(19) United States
(12) Patent Application Publication
(10) Pub. No.: US 2025/0041455 A1
(43) Pub. Date: Feb. 6, 2025

(54) ANTI-TFR:GAA AND ANTI-CD63:GAA INSERTION FOR TREATMENT OF POMPE DISEASE

(71) Applicant: Regeneron Pharmaceuticals, Inc., Tarrytown, NY (US)

(72) Inventors: Andrew Baik, Scarsdale, NY (US); Allen Lin, Woodside, NY (US); Maria Praggastis, Cortlandt Manor, NY (US); Katherine Cygnar, New York, NY (US); Evangelos Pefanis, Somers, NY (US); Leah Sabin, Goldens Bridge, NY (US)

(21) Appl. No.: 18/785,712

(22) Filed: Jul. 26, 2024

Related U.S. Application Data
(60) Provisional application No. 63/516,395, filed on Jul. 28, 2023.

(51) Int. Cl. A61K 48/00; A61K 38/47; A61K 47/68; A61P 3/00; C07K 16/28; C12N 9/22; C12N 15/11; C12N 15/86

(52) U.S. Cl. CPC A61K 48/0058; A61K 38/47; A61K 47/6815; A61K 48/0083; A61P 3/00; C07K 16/2881; C07K 16/2896; C12N 9/22; C12N 15/11; C12N 15/86; C12Y 302/0102; C07K 2317/565; C07K 2317/622; C07K 2317/92; C12N 2310/20; C12N 2750/14143; C12N 2800/80; C12N 2830/50

(57) ABSTRACT

Nucleic acid constructs and compositions that allow insertion of a multidomain therapeutic protein (e.g., GAA fusion protein) coding sequence into a target genomic locus such as an endogenous ALB locus and/or expression of the multidomain therapeutic protein (e.g., GAA fusion protein) coding sequence are also provided. The nucleic acid constructs and compositions can be used in methods of integration of a multidomain therapeutic protein (e.g., GAA fusion protein) nucleic acid into a target genomic locus, methods of expression of a multidomain therapeutic protein (e.g., GAA fusion protein) in a cell, methods of reducing glycogen accumulation, methods of treating Pompe disease or GAA deficiency in a subject, and method of preventing or reducing the onset of a sign or symptom of Pompe disease in a subject, including neonatal cells and subjects.

### CROSS-REFERENCE TO RELATED APPLICATIONS

[0001] This application claims the benefit of U.S. Application No. 63/516,395, filed Jul. 28, 2023, which is herein incorporated by reference in its entirety for all purposes.

### REFERENCE TO A SEQUENCE LISTING SUBMITTED AS AN XML FILE

[0002] The Sequence Listing written in file 616966SEQLIST.xml is 1,213,989 bytes, was created on Jul. 24, 2024, and is hereby incorporated by reference.

### BACKGROUND

[0003] Pompe disease (PD), or glycogen storage disease type II, is a monogenic, lysosomal disease caused by a deficiency in the activity of the enzyme lysosomal acid alpha-glucosidase (GAA). GAA deficiency results in an accumulation of its substrate, glycogen, in the lysosomes of cells in tissues including skeletal and cardiac muscle. This aberrant accumulation of glycogen in myofibers results in progressive damage of muscle tissue, with symptoms that can include cardiomegaly, mild to profound muscle weakness, and ultimately death due to cardiac or respiratory failure. Infantile onset PD (IOPD) is associated with GAA activity of <1% of normal. It is severe and affects visceral organs, muscles, and the central nervous system (CNS). Late onset PD (LOPD) is associated with GAA activity of 2-40%. It is less severe, with primarily respiratory and skeletal muscle involvement.

[0004] The only approved therapy for PD is enzyme replacement therapy (ERT). Recombinant human (rh) GAA is delivered by intravenous infusion into patients every other week. While ERT has been very successful in treating the cardiac manifestations of PD, skeletal muscle and the CNS remain minimally treated by ERT. The primary mechanism by which rhGAA reaches lysosomes is through uptake by the cation-independent mannose 6-phosphate (M6P) receptor (CIMPR), which binds M6P on rhGAA. However, CI-MPR expression in skeletal muscle is very low, and rhGAA is poorly mannose 6-phosphorylated. In addition, CI-MPR may be misdirected into autophagosomes in affected cells, rather than lysosomes, while a large amount of the drug is also taken up by the liver, an organ that does not have primary pathology in PD. The ERT does not cross the blood-brain-barrier. In addition, PD can require treatment early in life, which presents additional hurdles due to the unique environment in neonatal and juvenile patients.

### SUMMARY

[0005] Nucleic acid constructs and compositions that allow insertion of a multidomain therapeutic protein (e.g., GAA fusion protein) coding sequence into a target genomic locus such as an endogenous ALB locus and/or expression of the multidomain therapeutic protein (e.g., GAA fusion protein) coding sequence are provided. The nucleic acid constructs and compositions can be used in methods of integrating or inserting a multidomain therapeutic protein (e.g., GAA fusion protein) nucleic acid into a target genomic locus in a cell or a population of cells or a subject, methods of expressing a multidomain therapeutic protein (e.g., GAA fusion protein) in a cell or a population of cells or a subject, methods of reducing glycogen accumulation in a cell or a population of cells or a subject, and methods of treating Pompe disease or GAA deficiency in a subject, and method of preventing or reducing the onset of a sign or symptom of Pompe disease in a subject such as subjects with reduced GAA activity or expression and in a subject diagnosed with Pompe disease, including neonatal subjects. In some embodiments the cell, population of cells, or subject is a neonatal cell, a neonatal population of cells, or a neonatal subject.

[0006] In one aspect, provided are compositions comprising a nucleic acid construct comprising a coding sequence for a multidomain therapeutic protein comprising a delivery domain fused to a lysosomal alpha-glucosidase polypeptide, wherein the lysosomal alpha-glucosidase coding sequence is CpG-depleted relative to a wild type lysosomal alpha-glucosidase coding sequence, optionally wherein the delivery domain is a CD63-binding delivery domain or a TfR-binding delivery domain. In some such compositions, the nucleic acid construct comprises a polyadenylation signal or sequence downstream of the coding sequence for the multidomain therapeutic protein. In some such compositions, the polyadenylation signal comprises a bovine growth hormone (BGH) polyadenylation signal, a simian virus 40 (SV40) polyadenylation signal, or a combination of the bovine growth hormone polyadenylation signal and the SV40 polyadenylation signal. In some such compositions, the SV40 polyadenylation signal is a unidirectional SV40 late polyadenylation signal, wherein each instance of the sequence AATAAA in the reverse strand is mutated in the unidirectional SV40 late polyadenylation signal, optionally wherein the SV40 polyadenylation signal is at least 95%, at least 96%, at least 97%, at least 98%, or at least 99% identical to the sequence set forth in SEQ ID NO: 752, and optionally wherein the SV40 polyadenylation signal comprises the sequence set forth in SEQ ID NO: 752. In some such compositions, the polyadenylation signal comprises the BGH polyadenylation signal, optionally wherein the BGH polyadenylation signal is at least 95%, at least 96%, at least 97%, at least 98%, or at least 99% identical to the sequence set forth in SEQ ID NO: 751, optionally wherein the BGH polyadenylation signal comprises the sequence set forth in SEQ ID NO: 751. In some such compositions, the polyadenylation signal comprises the BGH polyadenylation signal and the SV40 polyadenylation signal, optionally wherein the BGH polyadenylation signal comprises the sequence set forth in SEQ ID NO: 751, and optionally wherein the SV40 polyadenylation signal comprises the sequence set forth in SEQ ID NO: 752, optionally wherein the polyadenylation signal comprising the BGH polyadenylation signal and the SV40 polyadenylation signal is at least 95%, at least 96%, at least 97%, at least 98%, or at least 99% identical to the sequence set forth in SEQ ID NO: 795, and optionally wherein the polyadenylation signal comprising the BGH polyadenylation signal and the SV40 polyadenylation signal comprises the sequence set forth in SEQ ID NO: 795. In some such compositions, the nucleic acid construct is a unidirectional nucleic acid construct.

[0007] In some such compositions, the coding sequence for the delivery domain is modified to remove one or more cryptic splice sites, the coding sequence for the lysosomal alpha-glucosidase polypeptide is modified to remove one or more cryptic splice sites, or the coding sequence for the multidomain therapeutic protein is modified to remove one or more cryptic splice sites. In some such compositions, the coding sequence for the delivery domain is CpG-depleted, or the coding sequence for the multidomain therapeutic protein is CpG-depleted. In some such compositions, the coding sequence for the delivery domain is codon-optimized and CpG-depleted, the coding sequence for the lysosomal alpha-glucosidase polypeptide is codon-optimized and CpG-depleted, or the coding sequence for the multidomain therapeutic protein is codon-optimized and CpG-depleted.

[0008] In some such compositions, the nucleic acid construct comprises a splice acceptor upstream of the coding sequence for the multidomain therapeutic protein. In some such compositions, the nucleic acid construct does not comprise a homology arm. In some such compositions, the nucleic acid construct comprises from 5′ to 3′: a splice acceptor, the coding sequence for the multidomain therapeutic protein, and a polyadenylation signal or sequence, wherein the nucleic acid construct does not comprise a promoter that drives the expression of the multidomain therapeutic protein, and wherein the nucleic acid construct does not comprise a homology arm. In some such compositions, the nucleic acid construct comprises homology arms. In some such compositions, the nucleic acid construct does not comprise a promoter that drives the expression of the multidomain therapeutic protein. In some such compositions, the coding sequence for the multidomain therapeutic protein is operably linked to a promoter, optionally wherein the promoter is a liver-specific promoter.

[0009] In some such compositions, the C-terminus of the delivery domain is fused to the N-terminus of the lysosomal alpha-glucosidase polypeptide. In some such compositions, the delivery domain is fused to the lysosomal alpha-glucosidase polypeptide via a peptide linker. In some such compositions, the lysosomal alpha-glucosidase polypeptide lacks the lysosomal alpha-glucosidase signal peptide and propeptide. In some such compositions, the lysosomal alpha-glucosidase polypeptide comprises, consists essentially of, or consists of the sequence set forth in SEQ ID NO: 727. In some such compositions, the lysosomal alpha-glucosidase coding sequence is at least 90%, at least 91%, at least 92%, at least 93%, at least 94%, at least 95%, at least 96%, at least 97%, at least 98%, or at least 99% identical to SEQ ID NO: 750, optionally wherein the nucleotide at position 1095 is a G, the nucleotide at position 1098 is a C, and the nucleotide at position 2343 is a G. In some such compositions, the lysosomal alpha-glucosidase coding sequence is at least 90%, at least 91%, at least 92%, at least 93%, at least 94%, at least 95%, at least 96%, at least 97%, at least 98%, or at least 99% identical to any one of SEQ ID NO: 750 and encodes a lysosomal alpha-glucosidase protein comprising SEQ ID NO: 727, optionally wherein the nucleotide at position 1095 is a G, the nucleotide at position 1098 is a C, and the nucleotide at position 2343 is a G. In some such compositions, the lysosomal alpha-glucosidase coding sequence comprises, consists essentially of, or consists of the sequence set forth in any one of SEQ ID NO: 750. In some such compositions, the lysosomal alpha-glucosidase coding sequence is at least 90%, at least 91%, at least 92%, at least 93%, at least 94%, at least 95%, at least 96%, at least 97%, at least 98%, or at least 99% identical to SEQ ID NO: 749, optionally wherein the nucleotide at position 2343 is a G. In some such compositions, the lysosomal alpha-glucosidase coding sequence is at least 90%, at least 91%, at least 92%, at least 93%, at least 94%, at least 95%, at least 96%, at least 97%, at least 98%, or at least 99% identical to any one of SEQ ID NO: 749 and encodes a lysosomal alpha-glucosidase protein comprising SEQ ID NO: 727, optionally wherein the nucleotide at position 2343 is a G. In some such compositions, the lysosomal alpha-glucosidase coding sequence comprises, consists essentially of, or consists of the sequence set forth in any one of SEQ ID NO: 749.

[0010] In some such compositions, the delivery domain is the TfR-binding delivery domain. In some such compositions, the TfR-binding delivery domain comprises an anti-TfR antigen-binding protein, optionally wherein the antigen-binding protein binds to human transferrin receptor with a K_{D} of about 41 nM or a stronger affinity, optionally wherein the antigen-binding protein binds to human transferrin receptor with a K_{D} of about 3 nM or a stronger affinity, or optionally wherein the antigen-binding protein binds to human transferrin receptor with a K_{D} of about 0.45 nM to 3 nM. In some such compositions, the anti-TfR antigen binding protein comprises: (i) a HCVR that comprises the HCDR1, HCDR2 and HCDR3 of a HCVR comprising the amino acid sequence set forth in SEQ ID NO: 171, 181, 191, 201, 211, 221, 231, 241, 251, 261, 271, 281, 291, 301, 311, 321, 331, 341, 351, 361, 371, 381, 391, 401, 411, 421, 431, 441, 451, 461, 471, or 481 (or a variant thereof); and/or (ii) a LCVR that comprises the LCDR1, LCDR2 and LCDR3 of a LCVR comprising the amino acid sequence set forth in SEQ ID NO: 176, 186, 196, 206, 216, 226, 236, 246, 256, 266, 276, 286, 296, 306, 316, 326, 336, 346, 356, 366, 376, 386, 396, 406, 416, 426, 436, 446, 456, 466, 476, or 486 (or a variant thereof).

[0011] In some such compositions, the anti-TfR antigen binding protein comprises: (1) a HCVR comprising the HCDR1, HCDR2 and HCDR3 of a HCVR that comprises the amino acid sequence set forth in SEQ ID NO: 171 (or a variant thereof); and a LCVR comprising the LCDR1, LCDR2 and LCDR3 of a LCVR that comprises the amino acid sequence set forth in SEQ ID NO: 176 (or a variant thereof); (2) a HCVR comprising the HCDR1, HCDR2 and HCDR3 of a HCVR that comprises the amino acid sequence set forth in SEQ ID NO: 181 (or a variant thereof); and a LCVR comprising the LCDR1, LCDR2 and LCDR3 of a LCVR that comprises the amino acid sequence set forth in SEQ ID NO: 186 (or a variant thereof); (3) a HCVR comprising the HCDR1, HCDR2 and HCDR3 of a HCVR that comprises the amino acid sequence set forth in SEQ ID NO: 191 (or a variant thereof); and a LCVR comprising the LCDR1, LCDR2 and LCDR3 of a LCVR that comprises the amino acid sequence set forth in SEQ ID NO: 196 (or a variant thereof); (4) a HCVR comprising the HCDR1, HCDR2 and HCDR3 of a HCVR that comprises the amino acid sequence set forth in SEQ ID NO: 201 (or a variant thereof); and a LCVR comprising the LCDR1, LCDR2 and LCDR3 of a LCVR that comprises the amino acid sequence set forth in SEQ ID NO: 206 (or a variant thereof); (5) a HCVR comprising the HCDR1, HCDR2 and HCDR3 of a HCVR that comprises the amino acid sequence set forth in SEQ ID NO: 211 (or a variant thereof); and a LCVR comprising the LCDR1, LCDR2 and LCDR3 of a LCVR that comprises the amino acid sequence set forth in SEQ ID NO: 216 (or a variant thereof); (6) a HCVR comprising the HCDR1, HCDR2 and HCDR3 of a HCVR that comprises the amino acid sequence set forth in SEQ ID NO: 221 (or a variant thereof); and a LCVR comprising the LCDR1, LCDR2 and LCDR3 of a LCVR that comprises the amino acid sequence set forth in SEQ ID NO: 226 (or a variant thereof); (7) a HCVR comprising the HCDR1, HCDR2 and HCDR3 of a HCVR that comprises the amino acid sequence set forth in SEQ ID NO: 231 (or a variant thereof); and a LCVR comprising the LCDR1, LCDR2 and LCDR3 of a LCVR that comprises the amino acid sequence set forth in SEQ ID NO: 236 (or a variant thereof); (8) a HCVR comprising the HCDR1, HCDR2 and HCDR3 of a HCVR that comprises the amino acid sequence set forth in SEQ ID NO: 241 (or a variant thereof); and a LCVR comprising the LCDR1, LCDR2 and LCDR3 of a LCVR that comprises the amino acid sequence set forth in SEQ ID NO: 246 (or a variant thereof); (9) a HCVR comprising the HCDR1, HCDR2 and HCDR3 of a HCVR that comprises the amino acid sequence set forth in SEQ ID NO: 251 (or a variant thereof); and a LCVR comprising the LCDR1, LCDR2 and LCDR3 of a LCVR that comprises the amino acid sequence set forth in SEQ ID NO: 256 (or a variant thereof); (10) a HCVR comprising the HCDR1, HCDR2 and HCDR3 of a HCVR that comprises the amino acid sequence set forth in SEQ ID NO: 261 (or a variant thereof); and a LCVR comprising the LCDR1, LCDR2 and LCDR3 of a LCVR that comprises the amino acid sequence set forth in SEQ ID NO: 266 (or a variant thereof); (11) a HCVR comprising the HCDR1, HCDR2 and HCDR3 of a HCVR that comprises the amino acid sequence set forth in SEQ ID NO: 271 (or a variant thereof); and a LCVR comprising the LCDR1, LCDR2 and LCDR3 of a LCVR that comprises the amino acid sequence set forth in SEQ ID NO: 276 (or a variant thereof); (12) a HCVR comprising the HCDR1, HCDR2 and HCDR3 of a HCVR that comprises the amino acid sequence set forth in SEQ ID NO: 281 (or a variant thereof); and a LCVR comprising the LCDR1, LCDR2 and LCDR3 of a LCVR that comprises the amino acid sequence set forth in SEQ ID NO: 286 (or a variant thereof); (13) a HCVR comprising the HCDR1, HCDR2 and HCDR3 of a HCVR that comprises the amino acid sequence set forth in SEQ ID NO: 291 (or a variant thereof); and a LCVR comprising the LCDR1, LCDR2 and LCDR3 of a LCVR that comprises the amino acid sequence set forth in SEQ ID NO: 296 (or a variant thereof); (14) a HCVR comprising the HCDR1, HCDR2 and HCDR3 of a HCVR that comprises the amino acid sequence set forth in SEQ ID NO: 301 (or a variant thereof); and a LCVR comprising the LCDR1, LCDR2 and LCDR3 of a LCVR that comprises the amino acid sequence set forth in SEQ ID NO: 306 (or a variant thereof); (15) a HCVR comprising the HCDR1, HCDR2 and HCDR3 of a HCVR that comprises the amino acid sequence set forth in SEQ ID NO: 311 (or a variant thereof); and a LCVR comprising the LCDR1, LCDR2 and LCDR3 of a LCVR that comprises the amino acid sequence set forth in SEQ ID NO: 316 (or a variant thereof); (16) a HCVR comprising the HCDR1, HCDR2 and HCDR3 of a HCVR that comprises the amino acid sequence set forth in SEQ ID NO: 321 (or a variant thereof); and a LCVR comprising the LCDR1, LCDR2 and LCDR3 of a LCVR that comprises the amino acid sequence set forth in SEQ ID NO: 326 (or a variant thereof); (17) a HCVR comprising the HCDR1, HCDR2 and HCDR3 of a HCVR that comprises the amino acid sequence set forth in SEQ ID NO: 331 (or a variant thereof); and a LCVR comprising the LCDR1, LCDR2 and LCDR3 of a LCVR that comprises the amino acid sequence set forth in SEQ ID NO: 336 (or a variant thereof); (18) a HCVR comprising the HCDR1, HCDR2 and HCDR3 of a HCVR that comprises the amino acid sequence set forth in SEQ ID NO: 341 (or a variant thereof); and a LCVR comprising the LCDR1, LCDR2 and LCDR3 of a LCVR that comprises the amino acid sequence set forth in SEQ ID NO: 346 (or a variant thereof); (19) a HCVR comprising the HCDR1, HCDR2 and HCDR3 of a HCVR that comprises the amino acid sequence set forth in SEQ ID NO: 351 (or a variant thereof); and a LCVR comprising the LCDR1, LCDR2 and LCDR3 of a LCVR that comprises the amino acid sequence set forth in SEQ ID NO: 356 (or a variant thereof); (20) a HCVR comprising the HCDR1, HCDR2 and HCDR3 of a HCVR that comprises the amino acid sequence set forth in SEQ ID NO: 361 (or a variant thereof); and a LCVR comprising the LCDR1, LCDR2 and LCDR3 of a LCVR that comprises the amino acid sequence set forth in SEQ ID NO: 366 (or a variant thereof); (21) a HCVR comprising the HCDR1, HCDR2 and HCDR3 of a HCVR that comprises the amino acid sequence set forth in SEQ ID NO: 371 (or a variant thereof); and a LCVR comprising the LCDR1, LCDR2 and LCDR3 of a LCVR that comprises the amino acid sequence set forth in SEQ ID NO: 376 (or a variant thereof); (22) a HCVR comprising the HCDR1, HCDR2 and HCDR3 of a HCVR that comprises the amino acid sequence set forth in SEQ ID NO: 381 (or a variant thereof); and a LCVR comprising the LCDR1, LCDR2 and LCDR3 of a LCVR that comprises the amino acid sequence set forth in SEQ ID NO: 386 (or a variant thereof); (23) a HCVR comprising the HCDR1, HCDR2 and HCDR3 of a HCVR that comprises the amino acid sequence set forth in SEQ ID NO: 391 (or a variant thereof); and a LCVR comprising the LCDR1, LCDR2 and LCDR3 of a LCVR that comprises the amino acid sequence set forth in SEQ ID NO: 396 (or a variant thereof); (24) a HCVR comprising the HCDR1, HCDR2 and HCDR3 of a HCVR that comprises the amino acid sequence set forth in SEQ ID NO: 401 (or a variant thereof); and a LCVR comprising the LCDR1, LCDR2 and LCDR3 of a LCVR that comprises the amino acid sequence set forth in SEQ ID NO: 406 (or a variant thereof); (25) a HCVR comprising the HCDR1, HCDR2 and HCDR3 of a HCVR that comprises the amino acid sequence set forth in SEQ ID NO: 411 (or a variant thereof); and a LCVR comprising the LCDR1, LCDR2 and LCDR3 of a LCVR that comprises the amino acid sequence set forth in SEQ ID NO: 416 (or a variant thereof); (26) a HCVR comprising the HCDR1, HCDR2 and HCDR3 of a HCVR that comprises the amino acid sequence set forth in SEQ ID NO: 421 (or a variant thereof); and a LCVR comprising the LCDR1, LCDR2 and LCDR3 of a LCVR that comprises the amino acid sequence set forth in SEQ ID NO: 426 (or a variant thereof); (27) a HCVR comprising the HCDR1, HCDR2 and HCDR3 of a HCVR that comprises the amino acid sequence set forth in SEQ ID NO: 431 (or a variant thereof); and a LCVR comprising the LCDR1, LCDR2 and LCDR3 of a LCVR that comprises the amino acid sequence set forth in SEQ ID NO: 436 (or a variant thereof); (28) a HCVR comprising the HCDR1, HCDR2 and HCDR3 of a HCVR that comprises the amino acid sequence set forth in SEQ ID NO: 441 (or a variant thereof); and a LCVR comprising the LCDR1, LCDR2 and LCDR3 of a LCVR that comprises the amino acid sequence set forth in SEQ ID NO: 446 (or a variant thereof); (29) a HCVR comprising the HCDR1, HCDR2 and HCDR3 of a HCVR that comprises the amino acid sequence set forth in SEQ ID NO: 451 (or a variant thereof); and a LCVR comprising the LCDR1, LCDR2 and LCDR3 of a LCVR that comprises the amino acid sequence set forth in SEQ ID NO: 456 (or a variant thereof); (30) a HCVR comprising the HCDR1, HCDR2 and HCDR3 of a HCVR that comprises the amino acid sequence set forth in SEQ ID NO: 461 (or a variant thereof); and a LCVR comprising the LCDR1, LCDR2 and LCDR3 of a LCVR that comprises the amino acid sequence set forth in SEQ ID NO: 466 (or a variant thereof); (31) a HCVR comprising the HCDR1, HCDR2 and HCDR3 of a HCVR that comprises the amino acid sequence set forth in SEQ ID NO: 471 (or a variant thereof); and a LCVR comprising the LCDR1, LCDR2 and LCDR3 of a LCVR that comprises the amino acid sequence set forth in SEQ ID NO: 476 (or a variant thereof); or (32) a HCVR comprising the HCDR1, HCDR2 and HCDR3 of a HCVR that comprises the amino acid sequence set forth in SEQ ID NO: 481 (or a variant thereof); and a LCVR comprising the LCDR1, LCDR2 and LCDR3 of a LCVR that comprises the amino acid sequence set forth in SEQ ID NO: 486 (or a variant thereof).

[0012] In some such compositions, the anti-TfR antigen binding protein comprises: (1) a HCVR comprising the HCDR1, HCDR2 and HCDR3 of a HCVR that comprises the amino acid sequence set forth in SEQ ID NO: 391 (or a variant thereof); and a LCVR comprising the LCDR1, LCDR2 and LCDR3 of a LCVR that comprises the amino acid sequence set forth in SEQ ID NO: 396 (or a variant thereof); or (2) a HCVR comprising the HCDR1, HCDR2 and HCDR3 of a HCVR that comprises the amino acid sequence set forth in SEQ ID NO: 411 (or a variant thereof); and a LCVR comprising the LCDR1, LCDR2 and LCDR3 of a LCVR that comprises the amino acid sequence set forth in SEQ ID NO: 416 (or a variant thereof). In some such compositions, the anti-TfR antigen binding protein comprises: a HCVR comprising the HCDR1, HCDR2 and HCDR3 of a HCVR that comprises the amino acid sequence set forth in SEQ ID NO: 391 (or a variant thereof); and a LCVR comprising the LCDR1, LCDR2 and LCDR3 of a LCVR that comprises the amino acid sequence set forth in SEQ ID NO: 396 (or a variant thereof).

[0013] In some such compositions, the anti-TfR antigen binding protein comprises: (a) a HCVR that comprises: an HCDR1 comprising the amino acid sequence set forth in SEQ ID NO: 172 (or a variant thereof), an HCDR2 comprising the amino acid sequence set forth in SEQ ID NO: 173 (or a variant thereof), and an HCDR3 comprising the amino acid sequence set forth in SEQ ID NO: 174 (or a variant thereof); and a LCVR that comprises: an LCDR1 comprising the amino acid sequence set forth in SEQ ID NO: 177 (or a variant thereof), an LCDR2 comprising the amino acid sequence set forth in SEQ ID NO: 178 (or a variant thereof), and an LCDR3 comprising the amino acid sequence set forth in SEQ ID NO: 179 (or a variant thereof); (b) a HCVR that comprises: an HCDR1 comprising the amino acid sequence set forth in SEQ ID NO: 182 (or a variant thereof), an HCDR2 comprising the amino acid sequence set forth in SEQ ID NO: 183 (or a variant thereof), and an HCDR3 comprising the amino acid sequence set forth in SEQ ID NO: 184 (or a variant thereof); and a LCVR that comprises: an LCDR1 comprising the amino acid sequence set forth in SEQ ID NO: 187 (or a variant thereof), an LCDR2 comprising the amino acid sequence set forth in SEQ ID NO: 188 (or a variant thereof), and an LCDR3 comprising the amino acid sequence set forth in SEQ ID NO: 189 (or a variant thereof); (c) a HCVR that comprises: an HCDR1 comprising the amino acid sequence set forth in SEQ ID NO: 192 (or a variant thereof), an HCDR2 comprising the amino acid sequence set forth in SEQ ID NO: 193 (or a variant thereof), and an HCDR3 comprising the amino acid sequence set forth in SEQ ID NO: 194 (or a variant thereof); and a LCVR that comprises: an LCDR1 comprising the amino acid sequence set forth in SEQ ID NO: 197 (or a variant thereof), an LCDR2 comprising the amino acid sequence set forth in SEQ ID NO: 198 (or a variant thereof), and an LCDR3 comprising the amino acid sequence set forth in SEQ ID NO: 199 (or a variant thereof); (d) a HCVR that comprises: an HCDR1 comprising the amino acid sequence set forth in SEQ ID NO: 202 (or a variant thereof), an HCDR2 comprising the amino acid sequence set forth in SEQ ID NO: 203 (or a variant thereof), and an HCDR3 comprising the amino acid sequence set forth in SEQ ID NO: 204 (or a variant thereof); and a LCVR that comprises: an LCDR1 comprising the amino acid sequence set forth in SEQ ID NO: 207 (or a variant thereof), an LCDR2 comprising the amino acid sequence set forth in SEQ ID NO: 208 (or a variant thereof), and an LCDR3 comprising the amino acid sequence set forth in SEQ ID NO: 209 (or a variant thereof); (e) a HCVR that comprises: an HCDR1 comprising the amino acid sequence set forth in SEQ ID NO: 212 (or a variant thereof), an HCDR2 comprising the amino acid sequence set forth in SEQ ID NO: 213 (or a variant thereof), and an HCDR3 comprising the amino acid sequence set forth in SEQ ID NO: 214 (or a variant thereof); and a LCVR that comprises: an LCDR1 comprising the amino acid sequence set forth in SEQ ID NO: 217 (or a variant thereof), an LCDR2 comprising the amino acid sequence set forth in SEQ ID NO: 218 (or a variant thereof), and an LCDR3 comprising the amino acid sequence set forth in SEQ ID NO: 219 (or a variant thereof); (f) a HCVR that comprises: an HCDR1 comprising the amino acid sequence set forth in SEQ ID NO: 222 (or a variant thereof), an HCDR2 comprising the amino acid sequence set forth in SEQ ID NO: 223 (or a variant thereof), and an HCDR3 comprising the amino acid sequence set forth in SEQ ID NO: 224 (or a variant thereof); and a LCVR that comprises: an LCDR1 comprising the amino acid sequence set forth in SEQ ID NO: 227 (or a variant thereof), an LCDR2 comprising the amino acid sequence set forth in SEQ ID NO: 228 (or a variant thereof), and an LCDR3 comprising the amino acid sequence set forth in SEQ ID NO: 229 (or a variant thereof); (g) a HCVR that comprises: an HCDR1 comprising the amino acid sequence set forth in SEQ ID NO: 232 (or a variant thereof), an HCDR2 comprising the amino acid sequence set forth in SEQ ID NO: 233 (or a variant thereof), and an HCDR3 comprising the amino acid sequence set forth in SEQ ID NO: 234 (or a variant thereof); and a LCVR that comprises: an LCDR1 comprising the amino acid sequence set forth in SEQ ID NO: 237 (or a variant thereof), an LCDR2 comprising the amino acid sequence set forth in SEQ ID NO: 238 (or a variant thereof), and an LCDR3 comprising the amino acid sequence set forth in SEQ ID NO: 239 (or a variant thereof); (h) a HCVR that comprises: an HCDR1 comprising the amino acid sequence set forth in SEQ ID NO: 242 (or a variant thereof), an HCDR2 comprising the amino acid sequence set forth in SEQ ID NO: 243 (or a variant thereof), and an HCDR3 comprising the amino acid sequence set forth in SEQ ID NO: 244 (or a variant thereof); and a LCVR that comprises: an LCDR1 comprising the amino acid sequence set forth in SEQ ID NO: 247 (or a variant thereof), an LCDR2 comprising the amino acid sequence set forth in SEQ ID NO: 248 (or a variant thereof), and an LCDR3 comprising the amino acid sequence set forth in SEQ ID NO: 249 (or a variant thereof); (i) a HCVR that comprises: an HCDR1 comprising the amino acid sequence set forth in SEQ ID NO: 252 (or a variant thereof), an HCDR2 comprising the amino acid sequence set forth in SEQ ID NO: 253 (or a variant thereof), and an HCDR3 comprising the amino acid sequence set forth in SEQ ID NO: 254 (or a variant thereof); and a LCVR that comprises: an LCDR1 comprising the amino acid sequence set forth in SEQ ID NO: 257 (or a variant thereof), an LCDR2 comprising the amino acid sequence set forth in SEQ ID NO: 258 (or a variant thereof), and an LCDR3 comprising the amino acid sequence set forth in SEQ ID NO: 259 (or a variant thereof); (j) a HCVR that comprises: an HCDR1 comprising the amino acid sequence set forth in SEQ ID NO: 262 (or a variant thereof), an HCDR2 comprising the amino acid sequence set forth in SEQ ID NO: 263 (or a variant thereof), and an HCDR3 comprising the amino acid sequence set forth in SEQ ID NO: 264 (or a variant thereof); and a LCVR that comprises: an LCDR1 comprising the amino acid sequence set forth in SEQ ID NO: 267 (or a variant thereof), an LCDR2 comprising the amino acid sequence set forth in SEQ ID NO: 268 (or a variant thereof), and an LCDR3 comprising the amino acid sequence set forth in SEQ ID NO: 269 (or a variant thereof); (k) a HCVR that comprises: an HCDR1 comprising the amino acid sequence set forth in SEQ ID NO: 272 (or a variant thereof), an HCDR2 comprising the amino acid sequence set forth in SEQ ID NO: 273 (or a variant thereof), and an HCDR3 comprising the amino acid sequence set forth in SEQ ID NO: 274 (or a variant thereof); and a LCVR that comprises: an LCDR1 comprising the amino acid sequence set forth in SEQ ID NO: 277 (or a variant thereof), an LCDR2 comprising the amino acid sequence set forth in SEQ ID NO: 278 (or a variant thereof), and an LCDR3 comprising the amino acid sequence set forth in SEQ ID NO: 279 (or a variant thereof); (1) a HCVR that comprises: an HCDR1 comprising the amino acid sequence set forth in SEQ ID NO: 282 (or a variant thereof), an HCDR2 comprising the amino acid sequence set forth in SEQ ID NO: 283 (or a variant thereof), and an HCDR3 comprising the amino acid sequence set forth in SEQ ID NO: 284 (or a variant thereof); and a LCVR that comprises: an LCDR1 comprising the amino acid sequence set forth in SEQ ID NO: 287 (or a variant thereof), an LCDR2 comprising the amino acid sequence set forth in SEQ ID NO: 288 (or a variant thereof), and an LCDR3 comprising the amino acid sequence set forth in SEQ ID NO: 289 (or a variant thereof); (m) a HCVR that comprises: an HCDR1 comprising the amino acid sequence set forth in SEQ ID NO: 292 (or a variant thereof), an HCDR2 comprising the amino acid sequence set forth in SEQ ID NO: 293 (or a variant thereof), and an HCDR3 comprising the amino acid sequence set forth in SEQ ID NO: 294 (or a variant thereof); and a LCVR that comprises: an LCDR1 comprising the amino acid sequence set forth in SEQ ID NO: 297 (or a variant thereof), an LCDR2 comprising the amino acid sequence set forth in SEQ ID NO: 298 (or a variant thereof), and an LCDR3 comprising the amino acid sequence set forth in SEQ ID NO: 299 (or a variant thereof); (n) a HCVR that comprises: an HCDR1 comprising the amino acid sequence set forth in SEQ ID NO: 302 (or a variant thereof), an HCDR2 comprising the amino acid sequence set forth in SEQ ID NO: 303 (or a variant thereof), and an HCDR3 comprising the amino acid sequence set forth in SEQ ID NO: 304 (or a variant thereof); and a LCVR that comprises: an LCDR1 comprising the amino acid sequence set forth in SEQ ID NO: 307 (or a variant thereof), an LCDR2 comprising the amino acid sequence set forth in SEQ ID NO: 308 (or a variant thereof), and an LCDR3 comprising the amino acid sequence set forth in SEQ ID NO: 309 (or a variant thereof); (o) a HCVR that comprises: an HCDR1 comprising the amino acid sequence set forth in SEQ ID NO: 312 (or a variant thereof), an HCDR2 comprising the amino acid sequence set forth in SEQ ID NO: 313 (or a variant thereof), and an HCDR3 comprising the amino acid sequence set forth in SEQ ID NO: 314 (or a variant thereof); and a LCVR that comprises: an LCDR1 comprising the amino acid sequence set forth in SEQ ID NO: 317 (or a variant thereof), an LCDR2 comprising the amino acid sequence set forth in SEQ ID NO: 318 (or a variant thereof), and an LCDR3 comprising the amino acid sequence set forth in SEQ ID NO: 319 (or a variant thereof); (p) a HCVR that comprises: an HCDR1 comprising the amino acid sequence set forth in SEQ ID NO: 322 (or a variant thereof), an HCDR2 comprising the amino acid sequence set forth in SEQ ID NO: 323 (or a variant thereof), and an HCDR3 comprising the amino acid sequence set forth in SEQ ID NO: 324 (or a variant thereof); and a LCVR that comprises: an LCDR1 comprising the amino acid sequence set forth in SEQ ID NO: 327 (or a variant thereof), an LCDR2 comprising the amino acid sequence set forth in SEQ ID NO: 328 (or a variant thereof), and an LCDR3 comprising the amino acid sequence set forth in SEQ ID NO: 329 (or a variant thereof); (q) a HCVR that comprises: an HCDR1 comprising the amino acid sequence set forth in SEQ ID NO: 332 (or a variant thereof), an HCDR2 comprising the amino acid sequence set forth in SEQ ID NO: 333 (or a variant thereof), and an HCDR3 comprising the amino acid sequence set forth in SEQ ID NO: 334 (or a variant thereof); and a LCVR that comprises: an LCDR1 comprising the amino acid sequence set forth in SEQ ID NO: 337 (or a variant thereof), an LCDR2 comprising the amino acid sequence set forth in SEQ ID NO: 338 (or a variant thereof), and an LCDR3 comprising the amino acid sequence set forth in SEQ ID NO: 339 (or a variant thereof); (r) a HCVR that comprises: an HCDR1 comprising the amino acid sequence set forth in SEQ ID NO: 342 (or a variant thereof), an HCDR2 comprising the amino acid sequence set forth in SEQ ID NO: 343 (or a variant thereof), and an HCDR3 comprising the amino acid sequence set forth in SEQ ID NO: 344 (or a variant thereof); and a LCVR that comprises: an LCDR1 comprising the amino acid sequence set forth in SEQ ID NO: 347 (or a variant thereof), an LCDR2 comprising the amino acid sequence set forth in SEQ ID NO: 348 (or a variant thereof), and an LCDR3 comprising the amino acid sequence set forth in SEQ ID NO: 349 (or a variant thereof); (s) a HCVR that comprises: an HCDR1 comprising the amino acid sequence set forth in SEQ ID NO: 352 (or a variant thereof), an HCDR2 comprising the amino acid sequence set forth in SEQ ID NO: 353 (or a variant thereof), and an HCDR3 comprising the amino acid sequence set forth in SEQ ID NO: 354 (or a variant thereof); and a LCVR that comprises: an LCDR1 comprising the amino acid sequence set forth in SEQ ID NO: 357 (or a variant thereof), an LCDR2 comprising the amino acid sequence set forth in SEQ ID NO: 358 (or a variant thereof), and an LCDR3 comprising the amino acid sequence set forth in SEQ ID NO: 359 (or a variant thereof); (t) a HCVR that comprises: an HCDR1 comprising the amino acid sequence set forth in SEQ ID NO: 362 (or a variant thereof), an HCDR2 comprising the amino acid sequence set forth in SEQ ID NO: 363 (or a variant thereof), and an HCDR3 comprising the amino acid sequence set forth in SEQ ID NO: 364 (or a variant thereof); and a LCVR that comprises: an LCDR1 comprising the amino acid sequence set forth in SEQ ID NO: 367 (or a variant thereof), an LCDR2 comprising the amino acid sequence set forth in SEQ ID NO: 368 (or a variant thereof), and an LCDR3 comprising the amino acid sequence set forth in SEQ ID NO: 369 (or a variant thereof); (u) a HCVR that comprises: an HCDR1 comprising the amino acid sequence set forth in SEQ ID NO: 372 (or a variant thereof), an HCDR2 comprising the amino acid sequence set forth in SEQ ID NO: 373 (or a variant thereof), and an HCDR3 comprising the amino acid sequence set forth in SEQ ID NO: 374 (or a variant thereof); and a LCVR that comprises: an LCDR1 comprising the amino acid sequence set forth in SEQ ID NO: 377 (or a variant thereof), an LCDR2 comprising the amino acid sequence set forth in SEQ ID NO: 378 (or a variant thereof), and an LCDR3 comprising the amino acid sequence set forth in SEQ ID NO: 379 (or a variant thereof); (v) a HCVR that comprises: an HCDR1 comprising the amino acid sequence set forth in SEQ ID NO: 382 (or a variant thereof), an HCDR2 comprising the amino acid sequence set forth in SEQ ID NO: 383 (or a variant thereof), and an HCDR3 comprising the amino acid sequence set forth in SEQ ID NO: 384 (or a variant thereof); and a LCVR that comprises: an LCDR1 comprising the amino acid sequence set forth in SEQ ID NO: 387 (or a variant thereof), an LCDR2 comprising the amino acid sequence set forth in SEQ ID NO: 388 (or a variant thereof), and an LCDR3 comprising the amino acid sequence set forth in SEQ ID NO: 389 (or a variant thereof); (w) a HCVR that comprises: an HCDR1 comprising the amino acid sequence set forth in SEQ ID NO: 392 (or a variant thereof), an HCDR2 comprising the amino acid sequence set forth in SEQ ID NO: 393 (or a variant thereof), and an HCDR3 comprising the amino acid sequence set forth in SEQ ID NO: 394 (or a variant thereof); and a LCVR that comprises: an LCDR1 comprising the amino acid sequence set forth in SEQ ID NO: 397 (or a variant thereof), an LCDR2 comprising the amino acid sequence set forth in SEQ ID NO: 398 (or a variant thereof), and an LCDR3 comprising the amino acid sequence set forth in SEQ ID NO: 399 (or a variant thereof); (x) a HCVR that comprises: an HCDR1 comprising the amino acid sequence set forth in SEQ ID NO: 402 (or a variant thereof), an HCDR2 comprising the amino acid sequence set forth in SEQ ID NO: 403 (or a variant thereof), and an HCDR3 comprising the amino acid sequence set forth in SEQ ID NO: 404 (or a variant thereof); and a LCVR that comprises: an LCDR1 comprising the amino acid sequence set forth in SEQ ID NO: 407 (or a variant thereof), an LCDR2 comprising the amino acid sequence set forth in SEQ ID NO: 408 (or a variant thereof), and an LCDR3 comprising the amino acid sequence set forth in SEQ ID NO: 409 (or a variant thereof); (y) a HCVR that comprises: an HCDR1 comprising the amino acid sequence set forth in SEQ ID NO: 412 (or a variant thereof), an HCDR2 comprising the amino acid sequence set forth in SEQ ID NO: 413 (or a variant thereof), and an HCDR3 comprising the amino acid sequence set forth in SEQ ID NO: 414 (or a variant thereof); and a LCVR that comprises: an LCDR1 comprising the amino acid sequence set forth in SEQ ID NO: 417 (or a variant thereof), an LCDR2 comprising the amino acid sequence set forth in SEQ ID NO: 418 (or a variant thereof), and an LCDR3 comprising the amino acid sequence set forth in SEQ ID NO: 419 (or a variant thereof); (z) a HCVR that comprises: an HCDR1 comprising the amino acid sequence set forth in SEQ ID NO: 422 (or a variant thereof), an HCDR2 comprising the amino acid sequence set forth in SEQ ID NO: 423 (or a variant thereof), and an HCDR3 comprising the amino acid sequence set forth in SEQ ID NO: 424 (or a variant thereof); and a LCVR that comprises: an LCDR1 comprising the amino acid sequence set forth in SEQ ID NO: 427 (or a variant thereof), an LCDR2 comprising the amino acid sequence set forth in SEQ ID NO: 428 (or a variant thereof), and an LCDR3 comprising the amino acid sequence set forth in SEQ ID NO: 429 (or a variant thereof); (aa) a HCVR that comprises: an HCDR1 comprising the amino acid sequence set forth in SEQ ID NO: 432 (or a variant thereof), an HCDR2 comprising the amino acid sequence set forth in SEQ ID NO: 433 (or a variant thereof), and an HCDR3 comprising the amino acid sequence set forth in SEQ ID NO: 434 (or a variant thereof); and a LCVR that comprises: an LCDR1 comprising the amino acid sequence set forth in SEQ ID NO: 437 (or a variant thereof), an LCDR2 comprising the amino acid sequence set forth in SEQ ID NO: 438 (or a variant thereof), and an LCDR3 comprising the amino acid sequence set forth in SEQ ID NO: 439 (or a variant thereof); (ab) a HCVR that comprises: an HCDR1 comprising the amino acid sequence set forth in SEQ ID NO: 442 (or a variant thereof), an HCDR2 comprising the amino acid sequence set forth in SEQ ID NO: 443 (or a variant thereof), and an HCDR3 comprising the amino acid sequence set forth in SEQ ID NO: 444 (or a variant thereof); and a LCVR that comprises: an LCDR1 comprising the amino acid sequence set forth in SEQ ID NO: 447 (or a variant thereof), an LCDR2 comprising the amino acid sequence set forth in SEQ ID NO: 448 (or a variant thereof), and an LCDR3 comprising the amino acid sequence set forth in SEQ ID NO: 449 (or a variant thereof); (ac) a HCVR that comprises: an HCDR1 comprising the amino acid sequence set forth in SEQ ID NO: 452 (or a variant thereof), an HCDR2 comprising the amino acid sequence set forth in SEQ ID NO: 453 (or a variant thereof), and an HCDR3 comprising the amino acid sequence set forth in SEQ ID NO: 454 (or a variant thereof); and a LCVR that comprises: an LCDR1 comprising the amino acid sequence set forth in SEQ ID NO: 457 (or a variant thereof), an LCDR2 comprising the amino acid sequence set forth in SEQ ID NO: 458 (or a variant thereof), and an LCDR3 comprising the amino acid sequence set forth in SEQ ID NO: 459 (or a variant thereof); (ad) a HCVR that comprises: an HCDR1 comprising the amino acid sequence set forth in SEQ ID NO: 462 (or a variant thereof), an HCDR2 comprising the amino acid sequence set forth in SEQ ID NO: 463 (or a variant thereof), and an HCDR3 comprising the amino acid sequence set forth in SEQ ID NO: 464 (or a variant thereof); and a LCVR that comprises: an LCDR1 comprising the amino acid sequence set forth in SEQ ID NO: 467 (or a variant thereof), an LCDR2 comprising the amino acid sequence set forth in SEQ ID NO: 468 (or a variant thereof), and an LCDR3 comprising the amino acid sequence set forth in SEQ ID NO: 469 (or a variant thereof); (ae) a HCVR that comprises: an HCDR1 comprising the amino acid sequence set forth in SEQ ID NO: 472 (or a variant thereof), an HCDR2 comprising the amino acid sequence set forth in SEQ ID NO: 473 (or a variant thereof), and an HCDR3 comprising the amino acid sequence set forth in SEQ ID NO: 474 (or a variant thereof); and a LCVR that comprises: an LCDR1 comprising the amino acid sequence set forth in SEQ ID NO: 477 (or a variant thereof), an LCDR2 comprising the amino acid sequence set forth in SEQ ID NO: 478 (or a variant thereof), and an LCDR3 comprising the amino acid sequence set forth in SEQ ID NO: 479 (or a variant thereof); and/or (af) a HCVR that comprises: an HCDR1 comprising the amino acid sequence set forth in SEQ ID NO: 482 (or a variant thereof), an HCDR2 comprising the amino acid sequence set forth in SEQ ID NO: 483 (or a variant thereof), and an HCDR3 comprising the amino acid sequence set forth in SEQ ID NO: 484 (or a variant thereof); and a LCVR that comprises: an LCDR1 comprising the amino acid sequence set forth in SEQ ID NO: 487 (or a variant thereof), an LCDR2 comprising the amino acid sequence set forth in SEQ ID NO: 488 (or a variant thereof), and an LCDR3 comprising the amino acid sequence set forth in SEQ ID NO: 489 (or a variant thereof).

[0014] In some such compositions, the anti-TfR antigen binding protein comprises: (a) a HCVR that comprises: an HCDR1 comprising the amino acid sequence set forth in SEQ ID NO: 392 (or a variant thereof), an HCDR2 comprising the amino acid sequence set forth in SEQ ID NO: 393 (or a variant thereof), and an HCDR3 comprising the amino acid sequence set forth in SEQ ID NO: 394 (or a variant thereof); and a LCVR that comprises: an LCDR1 comprising the amino acid sequence set forth in SEQ ID NO: 397 (or a variant thereof), an LCDR2 comprising the amino acid sequence set forth in SEQ ID NO: 398 (or a variant thereof), and an LCDR3 comprising the amino acid sequence set forth in SEQ ID NO: 399 (or a variant thereof); or (b) a HCVR that comprises: an HCDR1 comprising the amino acid sequence set forth in SEQ ID NO: 412 (or a variant thereof), an HCDR2 comprising the amino acid sequence set forth in SEQ ID NO: 413 (or a variant thereof), and an HCDR3 comprising the amino acid sequence set forth in SEQ ID NO: 414 (or a variant thereof); and a LCVR that comprises: an LCDR1 comprising the amino acid sequence set forth in SEQ ID NO: 417 (or a variant thereof), an LCDR2 comprising the amino acid sequence set forth in SEQ ID NO: 418 (or a variant thereof), and an LCDR3 comprising the amino acid sequence set forth in SEQ ID NO: 419 (or a variant thereof). In some such compositions, the anti-TfR antigen binding protein comprises: a HCVR that comprises: an HCDR1 comprising the amino acid sequence set forth in SEQ ID NO: 392 (or a variant thereof), an HCDR2 comprising the amino acid sequence set forth in SEQ ID NO: 393 (or a variant thereof), and an HCDR3 comprising the amino acid sequence set forth in SEQ ID NO: 394 (or a variant thereof); and a LCVR that comprises: an LCDR1 comprising the amino acid sequence set forth in SEQ ID NO: 397 (or a variant thereof), an LCDR2 comprising the amino acid sequence set forth in SEQ ID NO: 398 (or a variant thereof), and an LCDR3 comprising the amino acid sequence set forth in SEQ ID NO: 399 (or a variant thereof).

[0015] In some such compositions, the anti-TfR antigen binding protein comprises: (i) a HCVR that comprises the amino acid sequence set forth in SEQ ID NO: 171 (or a variant thereof); and a LCVR that comprises the amino acid sequence set forth in SEQ ID NO: 176 (or a variant thereof); (ii) a HCVR that comprises the amino acid sequence set forth in SEQ ID NO: 181 (or a variant thereof); and a LCVR that comprises the amino acid sequence set forth in SEQ ID NO: 186 (or a variant thereof); (iii) a HCVR that comprises the amino acid sequence set forth in SEQ ID NO: 191 (or a variant thereof); and a LCVR that comprises the amino acid sequence set forth in SEQ ID NO: 196 (or a variant thereof); (iv) a HCVR that comprises the amino acid sequence set forth in SEQ ID NO: 201 (or a variant thereof); and a LCVR that comprises the amino acid sequence set forth in SEQ ID NO: 206 (or a variant thereof); (v) a HCVR that comprises the amino acid sequence set forth in SEQ ID NO: 211 (or a variant thereof); and a LCVR that comprises the amino acid sequence set forth in SEQ ID NO: 216 (or a variant thereof); (vi) a HCVR that comprises the amino acid sequence set forth in SEQ ID NO: 221 (or a variant thereof); and a LCVR that comprises the amino acid sequence set forth in SEQ ID NO: 226 (or a variant thereof); (vii) a HCVR that comprises the amino acid sequence set forth in SEQ ID NO: 231 (or a variant thereof); and a LCVR that comprises the amino acid sequence set forth in SEQ ID NO: 236 (or a variant thereof); (viii) a HCVR that comprises the amino acid sequence set forth in SEQ ID NO: 241 (or a variant thereof); and a LCVR that comprises the amino acid sequence set forth in SEQ ID NO: 246 (or a variant thereof); (ix) a HCVR that comprises the amino acid sequence set forth in SEQ ID NO: 251 (or a variant thereof); and a LCVR that comprises the amino acid sequence set forth in SEQ ID NO: 256 (or a variant thereof); (x) a HCVR that comprises the amino acid sequence set forth in SEQ ID NO: 261 (or a variant thereof); and a LCVR that comprises the amino acid sequence set forth in SEQ ID NO: 266 (or a variant thereof); (xi) a HCVR that comprises the amino acid sequence set forth in SEQ ID NO: 271 (or a variant thereof); and a LCVR that comprises the amino acid sequence set forth in SEQ ID NO: 276 (or a variant thereof); (xii) a HCVR that comprises the amino acid sequence set forth in SEQ ID NO: 281 (or a variant thereof); and a LCVR that comprises the amino acid sequence set forth in SEQ ID NO: 286 (or a variant thereof); (xiii) a HCVR that comprises the amino acid sequence set forth in SEQ ID NO: 291 (or a variant thereof); and a LCVR that comprises the amino acid sequence set forth in SEQ ID NO: 296 (or a variant thereof); (xiv) a HCVR that comprises the amino acid sequence set forth in SEQ ID NO: 301 (or a variant thereof); and a LCVR that comprises the amino acid sequence set forth in SEQ ID NO: 306 (or a variant thereof); (xv) a HCVR that comprises the amino acid sequence set forth in SEQ ID NO: 311 (or a variant thereof); and a LCVR that comprises the amino acid sequence set forth in SEQ ID NO: 316 (or a variant thereof); (xvi) a HCVR that comprises the amino acid sequence set forth in SEQ ID NO: 321 (or a variant thereof); and a LCVR that comprises the amino acid sequence set forth in SEQ ID NO: 326 (or a variant thereof); (xvii) a HCVR that comprises the amino acid sequence set forth in SEQ ID NO: 331 (or a variant thereof); and a LCVR that comprises the amino acid sequence set forth in SEQ ID NO: 336 (or a variant thereof); (xviii) a HCVR that comprises the amino acid sequence set forth in SEQ ID NO: 341 (or a variant thereof); and a LCVR that comprises the amino acid sequence set forth in SEQ ID NO: 346 (or a variant thereof); (xix) a HCVR that comprises the amino acid sequence set forth in SEQ ID NO: 351 (or a variant thereof); and a LCVR that comprises the amino acid sequence set forth in SEQ ID NO: 356 (or a variant thereof); (xx) a HCVR that comprises the amino acid sequence set forth in SEQ ID NO: 361 (or a variant thereof); and a LCVR that comprises the amino acid sequence set forth in SEQ ID NO: 366 (or a variant thereof); (xxi) a HCVR that comprises the amino acid sequence set forth in SEQ ID NO: 371 (or a variant thereof); and a LCVR that comprises the amino acid sequence set forth in SEQ ID NO: 376 (or a variant thereof); (xxii) a HCVR that comprises the amino acid sequence set forth in SEQ ID NO: 381 (or a variant thereof); and a LCVR that comprises the amino acid sequence set forth in SEQ ID NO: 386 (or a variant thereof); (xxiii) a HCVR that comprises the amino acid sequence set forth in SEQ ID NO: 391 (or a variant thereof); and a LCVR that comprises the amino acid sequence set forth in SEQ ID NO: 396 (or a variant thereof); (xxiv) a HCVR that comprises the amino acid sequence set forth in SEQ ID NO: 401 (or a variant thereof); and a LCVR that comprises the amino acid sequence set forth in SEQ ID NO: 406 (or a variant thereof); (xxv) a HCVR that comprises the amino acid sequence set forth in SEQ ID NO: 411 (or a variant thereof); and a LCVR that comprises the amino acid sequence set forth in SEQ ID NO: 416 (or a variant thereof); (xxvi) a HCVR that comprises the amino acid sequence set forth in SEQ ID NO: 421 (or a variant thereof); and a LCVR that comprises the amino acid sequence set forth in SEQ ID NO: 426 (or a variant thereof); (xxvii) a HCVR that comprises the amino acid sequence set forth in SEQ ID NO: 431 (or a variant thereof); and a LCVR that comprises the amino acid sequence set forth in SEQ ID NO: 436 (or a variant thereof); (xxviii) a HCVR that comprises the amino acid sequence set forth in SEQ ID NO: 441 (or a variant thereof); and a LCVR that comprises the amino acid sequence set forth in SEQ ID NO: 446 (or a variant thereof); (xxix) a HCVR that comprises the amino acid sequence set forth in SEQ ID NO: 451 (or a variant thereof); and a LCVR that comprises the amino acid sequence set forth in SEQ ID NO: 456 (or a variant thereof); (xxx) a HCVR that comprises the amino acid sequence set forth in SEQ ID NO: 461 (or a variant thereof); and a LCVR that comprises the amino acid sequence set forth in SEQ ID NO: 466 (or a variant thereof); (xxxi) a HCVR that comprises the amino acid sequence set forth in SEQ ID NO: 471 (or a variant thereof); and a LCVR that comprises the amino acid sequence set forth in SEQ ID NO: 476 (or a variant thereof); and/or (xxxii) a HCVR that comprises the amino acid sequence set forth in SEQ ID NO: 481 (or a variant thereof); and a LCVR that comprises the amino acid sequence set forth in SEQ ID NO: 486 (or a variant thereof).

[0016] In some such compositions, the anti-TfR antigen binding protein comprises: (i) a HCVR that comprises the amino acid sequence set forth in SEQ ID NO: 391 (or a variant thereof); and a LCVR that comprises the amino acid sequence set forth in SEQ ID NO: 396 (or a variant thereof); or (ii) a HCVR that comprises the amino acid sequence set forth in SEQ ID NO: 411 (or a variant thereof); and a LCVR that comprises the amino acid sequence set forth in SEQ ID NO: 416 (or a variant thereof). In some such compositions, the anti-TfR antigen binding protein comprises: a HCVR that comprises the amino acid sequence set forth in SEQ ID NO: 391 (or a variant thereof); and a LCVR that comprises the amino acid sequence set forth in SEQ ID NO: 396 (or a variant thereof).

[0017] In some such compositions, the TfR-binding delivery domain is an antigen-binding protein that binds to one or more epitopes of hTfR selected from: (a) an epitope comprising the sequence LLNE (SEQ ID NO: 796) and/or an epitope comprising the sequence TYKEL (SEQ ID NO: 706); (b) an epitope comprising the sequence DSTDFTGT (SEQ ID NO: 797) and/or an epitope comprising the sequence VKHPVTGQF (SEQ ID NO: 798) and/or an epitope comprising the sequence IERIPEL (SEQ ID NO: 799); (c) an epitope comprising the sequence LNENSYVPREAGSQKDEN (SEQ ID NO: 800); (d) an epitope comprising the sequence FEDL (SEQ ID NO: 718); (e) an epitope comprising the sequence IVDKNGRL (SEQ ID NO: 801); (f) an epitope comprising the sequence IVDKNGRLVY (SEQ ID NO: 802); (g) an epitope comprising the sequence DQTKF (SEQ ID NO: 803); (h) an epitope comprising the sequence LVENPGGY (SEQ ID NO: 804) and/or an epitope comprising the sequence PIVNAELSF (SEQ ID NO: 805) and/or an epitope comprising the sequence PYLGTTMDT (SEQ ID NO: 806); (i) an epitope comprising the sequence LLNENSYVPREAGSQKDENLAL (SEQ ID NO: 704) and/or an epitope comprising the sequence IYMDQTKFPIVNAEL (SEQ ID NO: 705) and/or an epitope comprising the sequence TYKEL (SEQ ID NO: 706); (j) an epitope comprising the sequence KRKLSEKLDSTDFTGTIKL (SEQ ID NO: 707) and/or an epitope comprising the sequence YTLIEKTMQNVKHPVTGQFL (SEQ ID NO: 708) and/or an epitope comprising the sequence LIERIPELNKVARAAAE (SEQ ID NO: 709); (k) an epitope comprising the sequence LNENSYVPREAGSQKDENL (SEQ ID NO: 710); (1) an epitope comprising the sequence GTKKDFEDL (SEQ ID NO: 711); (m) an epitope comprising the sequence SVIIVDKNGRLVYLVENPGGYVAYSK (SEQ ID NO: 712); (n) an epitope comprising the sequence LLNENSYVPREAGSQKDEN (SEQ ID NO: 713) and/or an epitope comprising the sequence DQTKFPIVNAEL (SEQ ID NO: 714) and/or an epitope comprising the sequence TYKELIERIPELNK (SEQ ID NO: 715); (o) an epitope comprising the sequence LLNENSYVPREAGSQKDEN (SEQ ID NO: 713) and/or an epitope comprising the sequence TYKELIERIPELNK (SEQ ID NO: 715); (p) an epitope comprising the sequence SVIIVDKNGRLVYLVENPGGYVAY (SEQ ID NO: 716); (q) an epitope comprising the sequence IYMDQTKFPIVNAEL (SEQ ID NO: 705) and/or an epitope comprising the sequence FGNMEGDCPSDWKTDSTCRM (SEQ ID NO: 717); (r) an epitope comprising the sequence LLNENSYVPREAGSQKDENLAL (SEQ ID NO: 704) and/or an epitope comprising the sequence LVENPGGYVAYSKAATVTGKL (SEQ ID NO: 719) and/or an epitope comprising the sequence IYMDQTKFPIVNAELSF (SEQ ID NO: 720) and/or an epitope comprising the sequence ISRAAAEKL (SEQ ID NO: 721) and/or an epitope comprising the sequence VTSESKNVKLTVSNVLKE (SEQ ID NO: 722) and/or an epitope comprising the sequence FCEDTDYPYLGTTMDT (SEQ ID NO: 723); (s) an epitope comprised within or overlapping with the sequence LLNENSYVPREAGSQKDENLAL (SEQ ID NO: 704) and/or an epitope comprised within or overlapping with the sequence IYMDQTKFPIVNAEL (SEQ ID NO: 705) and/or an epitope comprised within or overlapping with the sequence TYKEL (SEQ ID NO: 706); (t) an epitope comprised within or overlapping with the sequence KRKLSEKLDSTDFTGTIKL (SEQ ID NO: 707) and/or an epitope comprised within or overlapping with the sequence YTLIEKTMQNVKHPVTGQFL (SEQ ID NO: 708) and/or an epitope comprised within or overlapping with the sequence LIERIPELNKVARAAAE (SEQ ID NO: 709); (u) an epitope comprised within or overlapping with the sequence LNENSYVPREAGSQKDENL (SEQ ID NO: 710); (v) an epitope comprised within or overlapping with the sequence GTKKDFEDL (SEQ ID NO: 711); (w) an epitope comprised within or overlapping with the sequence SVIIVDKNGRLVYLVENPGGYVAYSK (SEQ ID NO: 712); (x) an epitope comprised within or overlapping with the sequence LLNENSYVPREAGSQKDEN (SEQ ID NO: 713) and/or an epitope comprised within or overlapping with the sequence DQTKFPIVNAEL (SEQ ID NO: 714) and/or an epitope comprised within or overlapping with the sequence TYKELIERIPELNK (SEQ ID NO: 715); (y) an epitope comprised within or overlapping with the sequence LLNENSYVPREAGSQKDEN (SEQ ID NO: 713) and/or an epitope comprised within or overlapping with the sequence TYKELIERIPELNK (SEQ ID NO: 715); (z) an epitope comprised within or overlapping with the sequence SVIIVDKNGRLVYLVENPGGYVAY (SEQ ID NO: 716); (aa) an epitope comprised within or overlapping with the sequence IYMDQTKFPIVNAEL (SEQ ID NO: 705) and/or an epitope comprised within or overlapping with the sequence FGNMEGDCPSDWKTDSTCRM (SEQ ID NO: 717); and (ab) an epitope comprised within or overlapping with the sequence LLNENSYVPREAGSQKDENLAL (SEQ ID NO: 704) and/or an epitope comprised within or overlapping with the sequence LVENPGGYVAYSKAATVTGKL (SEQ ID NO: 719) and/or an epitope comprised within or overlapping with the sequence IYMDQTKFPIVNAELSF (SEQ ID NO: 720) and/or an epitope comprised within or overlapping with the sequence ISRAAAEKL (SEQ ID NO: 721) and/or an epitope comprised within or overlapping with the sequence VTSESKNVKLTVSNVLKE (SEQ ID NO: 722) and/or an epitope comprised within or overlapping with the sequence FCEDTDYPYLGTTMDT (SEQ ID NO: 723).

[0018] In some such compositions, the TfR-binding delivery domain comprises an antibody or antigen-binding fragment thereof that binds to one or more epitopes of hTfR selected from: (a) an epitope consisting of the sequence LLNE (SEQ ID NO: 796) and/or an epitope consisting of the sequence TYKEL (SEQ ID NO: 706); (b) an epitope consisting of the sequence DSTDFTGT (SEQ ID NO: 797) and/or an epitope consisting of the sequence VKHPVTGQF (SEQ ID NO: 798) and/or an epitope consisting of the sequence IERIPEL (SEQ ID NO: 799); (c) an epitope consisting of the sequence LNENSYVPREAGSQKDEN (SEQ ID NO: 800); (d) an epitope consisting of the sequence FEDL (SEQ ID NO: 718); (e) an epitope consisting of the sequence IVDKNGRL (SEQ ID NO: 801); (f) an epitope consisting of the sequence IVDKNGRLVY (SEQ ID NO: 802); (g) an epitope consisting of the sequence DQTKF (SEQ ID NO: 803); (h) an epitope consisting of the sequence LVENPGGY (SEQ ID NO: 804) and/or an epitope consisting of the sequence PIVNAELSF (SEQ ID NO: 805) and/or an epitope consisting of the sequence PYLGTTMDT (SEQ ID NO: 806); (i) an epitope consisting of the sequence LLNENSYVPREAGSQKDENLAL (SEQ ID NO: 704) and/or an epitope consisting of the sequence IYMDQTKFPIVNAEL (SEQ ID NO: 705) and/or an epitope consisting of the sequence TYKEL (SEQ ID NO: 706); (j) an epitope consisting of the sequence KRKLSEKLDSTDFTGTIKL (SEQ ID NO: 707) and/or an epitope consisting of the sequence YTLIEKTMQNVKHPVTGQFL (SEQ ID NO: 708) and/or an epitope consisting of the sequence LIERIPELNKVARAAAE (SEQ ID NO: 709); (k) an epitope consisting of the sequence LNENSYVPREAGSQKDENL (SEQ ID NO: 710); (1) an epitope consisting of the sequence GTKKDFEDL (SEQ ID NO: 711); (m) an epitope consisting of the sequence SVIIVDKNGRLVYLVENPGGYVAYSK (SEQ ID NO: 712); (n) an epitope consisting of the sequence LLNENSYVPREAGSQKDEN (SEQ ID NO: 713) and/or an epitope consisting of the sequence DQTKFPIVNAEL (SEQ ID NO: 714) and/or an epitope consisting of the sequence TYKELIERIPELNK (SEQ ID NO: 715); (o) an epitope consisting of the sequence LLNENSYVPREAGSQKDEN (SEQ ID NO: 713) and/or an epitope consisting of the sequence TYKELIERIPELNK (SEQ ID NO: 715); (p) an epitope consisting of the sequence SVIIVDKNGRLVYLVENPGGYVAY (SEQ ID NO: 716); (q) an epitope consisting of the sequence IYMDQTKFPIVNAEL (SEQ ID NO: 705) and/or an epitope consisting of the sequence FGNMEGDCPSDWKTDSTCRM (SEQ ID NO: 717); and (r) an epitope consisting of the sequence LLNENSYVPREAGSQKDENLAL (SEQ ID NO: 704) and/or an epitope consisting of the sequence LVENPGGYVAYSKAATVTGKL (SEQ ID NO: 719) and/or an epitope consisting of the sequence IYMDQTKFPIVNAELSF (SEQ ID NO: 720) and/or an epitope consisting of the sequence ISRAAAEKL (SEQ ID NO: 721) and/or an epitope consisting of the sequence VTSESKNVKLTVSNVLKE (SEQ ID NO: 722) and/or an epitope consisting of the sequence FCEDTDYPYLGTTMDT (SEQ ID NO: 723).

[0019] In some such compositions, the TfR-binding delivery domain comprises an anti-TfR antibody, antibody fragment, or single-chain variable fragment (scFv). In some such compositions, the TfR-binding delivery domain is the single-chain variable fragment (scFv), optionally wherein the multidomain therapeutic protein comprises domains arranged in the following orientation: N′-heavy chain variable region-light chain variable region-lysosomal alpha-glucosidase polypeptide-C′ or N′-light chain variable region-heavy chain variable region-lysosomal alpha-glucosidase polypeptide-C′, optionally wherein the scFv and lysosomal alpha-glucosidase polypeptide are connected by a peptide linker, and optionally wherein the peptide linker which is -(GGGGS)ₘ- (SEQ ID NO: 537); wherein m is 1, 2, 3, 4, 5, 6, 7, 8, 9, or 10, optionally wherein the scFv variable regions are connected by a peptide linker, and optionally wherein the peptide linker which is -(GGGGS)ₘ- (SEQ ID NO: 537); wherein m is 1, 2, 3, 4, 5, 6, 7, 8, 9, or 10. In some such compositions, the multidomain therapeutic protein comprises a heavy chain variable region (V_{H}) and a light chain variable region (V_{L}), and the lysosomal alpha-glucosidase polypeptide, wherein the V_{H}, V_{L} and lysosomal alpha-glucosidase polypeptide are arranged as follows: (i) V_{L}-V_{H}-lysosomal alpha-glucosidase polypeptide; (ii) V_{H}-V_{L}-lysosomal alpha-glucosidase polypeptide; (iii) V_{L}-[(GGGGS)₃(SEQ ID NO: 616)]-V_{H}-[(GGGGS)₂(SEQ ID NO: 617)]-lysosomal alpha-glucosidase polypeptide; or (iv) V_{H}-[(GGGGS)3(SEQ ID NO: 616)]-V_{L}-[(GGGGS)₂(SEQ ID NO: 617)]-lysosomal alpha-glucosidase polypeptide.

[0020] In some such compositions, the scFv comprises, consists essentially of, or consists of the sequence set forth in SEQ ID NO: 508. In some such compositions, the scFv coding sequence is at least 90%, at least 91%, at least 92%, at least 93%, at least 94%, at least 95%, at least 96%, at least 97%, at least 98%, or at least 99% identical to SEQ ID NO: 532 and encodes an scFv comprising SEQ ID NO: 508. In some such compositions, the scFv coding sequence comprises, consists essentially of, or consists of the sequence set forth in SEQ ID NO: 532. In some such compositions, the multidomain therapeutic protein comprises, consists essentially of, or consists of the sequence set forth in SEQ ID NO: 746. In some such compositions, the multidomain therapeutic protein coding sequence is at least 90%, at least 91%, at least 92%, at least 93%, at least 94%, at least 95%, at least 96%, at least 97%, at least 98%, or at least 99% identical to SEQ ID NO: 745, optionally wherein the nucleotide at position 1857 is G, the nucleotide at position 1860 is C, and the nucleotide at position 3105 is G. In some such compositions, the multidomain therapeutic protein coding sequence is at least 90%, at least 91%, at least 92%, at least 93%, at least 94%, at least 95%, at least 96%, at least 97%, at least 98%, or at least 99% identical to SEQ ID NO: 745 and encodes a multidomain therapeutic protein comprising SEQ ID NO: 746, optionally wherein the nucleotide at position 1857 is G, the nucleotide at position 1860 is C, and the nucleotide at position 3105 is G. In some such compositions, the multidomain therapeutic protein coding sequence comprises, consists essentially of, or consists of the sequence set forth in SEQ ID NO: 745.

[0021] In some such compositions, the nucleic acid construct comprises from 5′ to 3′: a splice acceptor, the coding sequence for the multidomain therapeutic protein, and a polyadenylation signal or sequence, wherein the coding sequence for the multidomain therapeutic protein comprises SEQ ID NO: 745, optionally wherein the nucleic acid construct comprises the sequence set forth in SEQ ID NO: 780, optionally wherein the nucleic acid construct comprises the sequence set forth in SEQ ID NO: 764, wherein the polyadenylation signal comprises a BGH polyadenylation signal and a unidirectional SV40 late polyadenylation signal, optionally wherein the BGH polyadenylation signal comprises the sequence set forth in SEQ ID NO: 751 and the unidirectional SV40 late polyadenylation signal comprises the sequence set forth in SEQ ID NO: 752, optionally wherein the polyadenylation signal comprising the BGH polyadenylation signal and the unidirectional SV40 late polyadenylation signal comprises the sequence set forth in SEQ ID NO: 795, wherein the nucleic acid construct does not comprise a promoter that drives the expression of the multidomain therapeutic protein, and wherein the nucleic acid construct does not comprise a homology arm. In some such compositions, the nucleic acid construct comprises from 5′ to 3′: a splice acceptor, the coding sequence for the multidomain therapeutic protein, and a polyadenylation signal or sequence, wherein the coding sequence for the multidomain therapeutic protein comprises SEQ ID NO: 745, optionally wherein the nucleic acid construct comprises the sequence set forth in SEQ ID NO: 781, optionally wherein the nucleic acid construct comprises the sequence set forth in SEQ ID NO: 765, wherein the polyadenylation signal comprises a BGH polyadenylation signal, optionally wherein the BGH polyadenylation signal comprises the sequence set forth in SEQ ID NO: 751, wherein the nucleic acid construct does not comprise a promoter that drives the expression of the multidomain therapeutic protein, and wherein the nucleic acid construct does not comprise a homology arm.

[0022] In some such compositions, the delivery domain is the CD63-binding delivery domain. In some such compositions, the CD63-binding delivery domain comprises an anti-CD63 antigen-binding protein. In some such compositions, the CD63-binding delivery domain comprises an anti-CD63 antibody, antibody fragment, or single-chain variable fragment (scFv). In some such compositions, the CD63-binding delivery domain is the single-chain variable fragment (scFv). In some such compositions, the scFv comprises, consists essentially of, or consists of the sequence set forth in SEQ ID NO: 730. In some such compositions, the scFv coding sequence is at least 90%, at least 91%, at least 92%, at least 93%, at least 94%, at least 95%, at least 96%, at least 97%, at least 98%, or at least 99% identical to SEQ ID NO: 759, optionally wherein the nucleotide at position 3 is A, the nucleotide at position 132 is A, and the nucleotide at position 273 is T. In some such compositions, the scFv coding sequence is at least 90%, at least 91%, at least 92%, at least 93%, at least 94%, at least 95%, at least 96%, at least 97%, at least 98%, or at least 99% identical to SEQ ID NO: 759 and encodes an scFv comprising SEQ ID NO: 730, optionally wherein the nucleotide at position 3 is A, the nucleotide at position 132 is A, and the nucleotide at position 273 is T. In some such compositions, the scFv coding sequence comprises, consists essentially of, or consists of the sequence set forth in SEQ ID NO: 759. In some such compositions, the scFv coding sequence is at least 90%, at least 91%, at least 92%, at least 93%, at least 94%, at least 95%, at least 96%, at least 97%, at least 98%, or at least 99% identical to SEQ ID NO: 760, optionally wherein the nucleotide at position 273 is T. In some such compositions, the scFv coding sequence is at least 90%, at least 91%, at least 92%, at least 93%, at least 94%, at least 95%, at least 96%, at least 97%, at least 98%, or at least 99% identical to SEQ ID NO: 760 and encodes an scFv comprising SEQ ID NO: 730, optionally wherein the nucleotide at position 273 is T. In some such compositions, the scFv coding sequence comprises, consists essentially of, or consists of the sequence set forth in SEQ ID NO: 760. In some such compositions, the scFv coding sequence is at least 90%, at least 91%, at least 92%, at least 93%, at least 94%, at least 95%, at least 96%, at least 97%, at least 98%, or at least 99% identical to SEQ ID NO: 732. In some such compositions, the scFv coding sequence is at least 90%, at least 91%, at least 92%, at least 93%, at least 94%, at least 95%, at least 96%, at least 97%, at least 98%, or at least 99% identical to SEQ ID NO: 732 and encodes an scFv comprising SEQ ID NO: 730. In some such compositions, the scFv coding sequence comprises, consists essentially of, or consists of the sequence set forth in SEQ ID NO: 732.

[0023] In some such compositions, the multidomain therapeutic protein comprises, consists essentially of, or consists of the sequence set forth in SEQ ID NO: 733. In some such compositions, the multidomain therapeutic protein coding sequence is at least 90%, at least 91%, at least 92%, at least 93%, at least 94%, at least 95%, at least 96%, at least 97%, at least 98%, or at least 99% identical to SEQ ID NO: 756, optionally wherein the nucleotide at position 3 is A, the nucleotide at position 132 is A, the nucleotide at position 273 is T, the nucleotide at position 723 is G, the nucleotide at position 1830 is G, the nucleotide at position 1833 is C, and the nucleotide at position 3078 is G. In some such compositions, the multidomain therapeutic protein coding sequence is at least 90%, at least 91%, at least 92%, at least 93%, at least 94%, at least 95%, at least 96%, at least 97%, at least 98%, or at least 99% identical to SEQ ID NO: 756 and encodes a multidomain therapeutic protein comprising SEQ ID NO: 733, optionally wherein the nucleotide at position 3 is A, the nucleotide at position 132 is A, the nucleotide at position 273 is T, the nucleotide at position 723 is G, the nucleotide at position 1830 is G, the nucleotide at position 1833 is C, and the nucleotide at position 3078 is G. In some such compositions, the multidomain therapeutic protein coding sequence comprises, consists essentially of, or consists of the sequence set forth in SEQ ID NO: 756. In some such compositions, the multidomain therapeutic protein coding sequence is at least 90%, at least 91%, at least 92%, at least 93%, at least 94%, at least 95%, at least 96%, at least 97%, at least 98%, or at least 99% identical to SEQ ID NO: 757, optionally wherein the nucleotide at position 273 is T, the nucleotide at position 723 is G, the nucleotide at position 1830 is G, the nucleotide at position 1833 is C, and the nucleotide at position 3078 is G. In some such compositions, the multidomain therapeutic protein coding sequence is at least 90%, at least 91%, at least 92%, at least 93%, at least 94%, at least 95%, at least 96%, at least 97%, at least 98%, or at least 99% identical to SEQ ID NO: 757 and encodes a multidomain therapeutic protein comprising SEQ ID NO: 733, optionally wherein the nucleotide at position 273 is T, the nucleotide at position 723 is G, the nucleotide at position 1830 is G, the nucleotide at position 1833 is C, and the nucleotide at position 3078 is G. In some such compositions, the multidomain therapeutic protein coding sequence comprises, consists essentially of, or consists of the sequence set forth in SEQ ID NO: 757. In some such compositions, the multidomain therapeutic protein coding sequence is at least 90%, at least 91%, at least 92%, at least 93%, at least 94%, at least 95%, at least 96%, at least 97%, at least 98%, or at least 99% identical to SEQ ID NO: 758, optionally wherein the nucleotide at position 3078 is G. In some such compositions, the multidomain therapeutic protein coding sequence is at least 90%, at least 91%, at least 92%, at least 93%, at least 94%, at least 95%, at least 96%, at least 97%, at least 98%, or at least 99% identical to SEQ ID NO: 758 and encodes a multidomain therapeutic protein comprising SEQ ID NO: 733, optionally wherein the nucleotide at position 3078 is G. In some such compositions, the multidomain therapeutic protein coding sequence comprises, consists essentially of, or consists of the sequence set forth in SEQ ID NO: 758.

[0024] In some such compositions, the nucleic acid construct comprises from 5′ to 3′: a splice acceptor, the coding sequence for the multidomain therapeutic protein, and a polyadenylation signal or sequence, wherein the coding sequence for the multidomain therapeutic protein comprises SEQ ID NO: 756, optionally wherein the nucleic acid construct comprises the sequence set forth in SEQ ID NO: 793, optionally wherein the nucleic acid construct comprises the sequence set forth in SEQ ID NO: 777, wherein the polyadenylation signal comprises a BGH polyadenylation signal and a unidirectional SV40 late polyadenylation signal, optionally wherein the BGH polyadenylation signal comprises the sequence set forth in SEQ ID NO: 751 and the unidirectional SV40 late polyadenylation signal comprises the sequence set forth in SEQ ID NO: 752, optionally wherein the polyadenylation signal comprising the BGH polyadenylation signal and the unidirectional SV40 late polyadenylation signal comprises the sequence set forth in SEQ ID NO: 795, wherein the nucleic acid construct does not comprise a promoter that drives the expression of the multidomain therapeutic protein, and wherein the nucleic acid construct does not comprise a homology arm. In some such compositions, the nucleic acid construct comprises from 5′ to 3′: a splice acceptor, the coding sequence for the multidomain therapeutic protein, and a polyadenylation signal or sequence, wherein the coding sequence for the multidomain therapeutic protein comprises SEQ ID NO: 756, optionally wherein the nucleic acid construct comprises the sequence set forth in SEQ ID NO: 794, optionally wherein the nucleic acid construct comprises the sequence set forth in SEQ ID NO: 778, wherein the polyadenylation signal comprises a BGH polyadenylation signal, optionally wherein the BGH polyadenylation signal comprises the sequence set forth in SEQ ID NO: 751, wherein the nucleic acid construct does not comprise a promoter that drives the expression of the multidomain therapeutic protein, and wherein the nucleic acid construct does not comprise a homology arm.

[0025] In some such compositions, the nucleic acid construct is in a nucleic acid vector or a lipid nanoparticle. In some such compositions, the nucleic acid construct is in the nucleic acid vector, optionally wherein the nucleic acid vector is a viral vector. In some such compositions, the nucleic acid vector is an adeno-associated viral (AAV) vector, optionally wherein the nucleic acid construct is flanked by inverted terminal repeats (ITRs) on each end, optionally wherein the ITR on at least one end comprises, consists essentially of, or consists of SEQ ID NO: 160, and optionally wherein the ITR on each end comprises, consists essentially of, or consists of SEQ ID NO: 160. In some such compositions, the AAV vector is a single-stranded AAV (ssAAV) vector. In some such compositions, the AAV vector is a recombinant AAV8 (rAAV8) vector, optionally wherein the AAV vector is a single-stranded rAAV8 vector.

[0026] In some such compositions, the composition is in combination with a nuclease agent that targets a nuclease target site in a target genomic locus. In some such compositions, the target genomic locus is an albumin gene, optionally wherein the albumin gene is a human albumin gene. In some such compositions, the nuclease target site is in intron 1 of the albumin gene. In some such compositions, the nuclease agent comprises: (a) a zinc finger nuclease (ZFN); (b) a transcription activator-like effector nuclease (TALEN); or (c) (i) a Cas protein or a nucleic acid encoding the Cas protein; and (ii) a guide RNA or one or more DNAs encoding the guide RNA, wherein the guide RNA comprises a DNA-targeting segment that targets a guide RNA target sequence, and wherein the guide RNA binds to the Cas protein and targets the Cas protein to the guide RNA target sequence. In some such compositions, the nuclease agent comprises: (a) a Cas protein or a nucleic acid encoding the Cas protein; and (b) a guide RNA or one or more DNAs encoding the guide RNA, wherein the guide RNA comprises a DNA-targeting segment that targets a guide RNA target sequence, and wherein the guide RNA binds to the Cas protein and targets the Cas protein to the guide RNA target sequence.

[0027] In some such compositions, the guide RNA target sequence is in intron 1 of an albumin gene. In some such compositions, the DNA-targeting segment comprises any one of SEQ ID NOS: 30-61, optionally wherein the DNA-targeting segment comprises any one of SEQ ID NOS: 36, 30, 33, and 41, or wherein the DNA-targeting segment consists of any one of SEQ ID NOS: 30-61, optionally wherein the DNA-targeting segment consists of any one of SEQ ID NOS: 36, 30, 33, and 41. In some such compositions, the guide RNA comprises any one of SEQ ID NOS: 62-125, optionally wherein the guide RNA comprises any one of SEQ ID NOS: 68, 100, 62, 94, 65, 97, 73, and 105. In some such compositions, the DNA-targeting segment comprises or consists of SEQ ID NO: 36. In some such compositions, the guide RNA comprises SEQ ID NO: 68 or 100. In some such compositions, the composition comprises the guide RNA in the form of RNA. In some such compositions, the guide RNA comprises at least one modification. In some such compositions, the at least one modification comprises: (i) phosphorothioate bonds between the first four nucleotides at the 5′ end of the guide RNA; (ii) phosphorothioate bonds between the last four nucleotides at the 3′ end of the guide RNA; (iii) 2′-O-methyl-modified nucleotides at the first three nucleotides at the 5′ end of the guide RNA; and (iv) 2′-O-methyl-modified nucleotides at the last three nucleotides at the 3′ end of the guide RNA. In some such compositions, the composition comprises the guide RNA in the form of RNA, the guide RNA comprises SEQ ID NO: 100, and the guide RNA comprises: (i) phosphorothioate bonds between the first four nucleotides at the 5′ end of the guide RNA; (ii) phosphorothioate bonds between the last four nucleotides at the 3′ end of the guide RNA; (iii) 2′-O-methyl-modified nucleotides at the first three nucleotides at the 5′ end of the guide RNA; and (iv) 2′-O-methyl-modified nucleotides at the last three nucleotides at the 3′ end of the guide RNA.

[0028] In some such compositions, the Cas protein is a Cas9 protein, optionally wherein the Cas protein is derived from a Streptococcus pyogenes Cas9 protein. In some such compositions, the Cas protein comprises the sequence set forth in SEQ ID NO: 11. In some such compositions, the composition comprises the nucleic acid encoding the Cas protein, wherein the nucleic acid comprises an mRNA encoding the Cas protein. In some such compositions, the mRNA encoding the Cas protein comprises at least one modification. In some such compositions, the mRNA encoding the Cas protein is fully substituted with N1-methyl-pseudouridine. In some such compositions, the mRNA encoding the Cas protein comprises the sequence set forth in SEQ ID NO: 1 or 2. In some such compositions, the composition comprises the nucleic acid encoding the Cas protein, wherein the nucleic acid comprises an mRNA encoding the Cas protein, the mRNA encoding the Cas protein comprises the sequence set forth in SEQ ID NO: 1 or 2, and the mRNA encoding the Cas protein is fully substituted with N1-methyl-pseudouridine, comprises a 5′ cap, and comprises a poly(A) tail.

[0029] In some such compositions, the composition comprises the guide RNA in the form of RNA, and the guide RNA comprises SEQ ID NO: 68 or 100, and wherein the composition comprises administering the nucleic acid encoding the Cas protein, wherein the nucleic acid comprises an mRNA encoding the Cas protein, and the mRNA encoding the Cas protein comprises the sequence set forth in SEQ ID NO: 1 or 2. In some such compositions, the composition comprises the guide RNA in the form of RNA, the guide RNA comprises SEQ ID NO: 100, and the guide RNA comprises: (i) phosphorothioate bonds between the first four nucleotides at the 5′ end of the guide RNA; (ii) phosphorothioate bonds between the last four nucleotides at the 3′ end of the guide RNA; (iii) 2′-O-methyl-modified nucleotides at the first three nucleotides at the 5′ end of the guide RNA; and (iv) 2′-O-methyl-modified nucleotides at the last three nucleotides at the 3′ end of the guide RNA, and wherein the composition the nucleic acid encoding the Cas protein, wherein the nucleic acid comprises an mRNA encoding the Cas protein, the mRNA encoding the Cas protein comprises the sequence set forth in SEQ ID NO: 1 or 2, and the mRNA encoding the Cas protein is fully substituted with N1-methyl-pseudouridine, comprises a 5′ cap, and comprises a poly(A) tail.

[0030] In some such compositions, the Cas protein or the nucleic acid encoding the Cas protein and the guide RNA or the one or more DNAs encoding the guide RNA are associated with a lipid nanoparticle. In some such compositions, the lipid nanoparticle comprises a cationic lipid, a neutral lipid, a helper lipid, and a stealth lipid. In some such compositions, the cationic lipid is Lipid A ((9Z,12Z)-3-((4,4-bis(octyloxy)butanoyl)oxy)-2-((((3-(diethylamino)propoxy)carbonyl)oxy)methyl)propyl octadeca-9,12-dienoate), and/or wherein the neutral lipid is distearoylphosphatidylcholine or 1,2-distearoyl-sn-glycero-3-phosphocholine (DSPC), and/or wherein the helper lipid is cholesterol, and/or wherein the stealth lipid is 1,2-dimyristoyl-rac-glycero-3-methoxypolyethylene glycol-2000. In some such compositions, the cationic lipid is Lipid A, the neutral lipid is DSPC, the helper lipid is cholesterol, and the stealth lipid is PEG2k-DMG. In some such compositions, the lipid nanoparticle comprises four lipids at the following molar ratios: about 50 mol % Lipid A, about 9 mol % DSPC, about 38 mol % cholesterol, and about 3 mol % PEG2k-DMG.

[0031] In another aspect, provided are cells comprising any of the above compositions. In some such cells, the nucleic acid construct or the coding sequence for the multidomain therapeutic protein is integrated into a target genomic locus, and wherein the multidomain therapeutic protein is expressed from the target genomic locus, or wherein the nucleic acid construct or the coding sequence for the multidomain therapeutic protein is integrated into intron 1 of an endogenous albumin locus, and wherein the multidomain therapeutic protein is expressed from the endogenous albumin locus. In some such cells, the percentage of unintended transcripts from the target genomic locus containing comprising the integrated nucleic acid construct or coding sequence for the multidomain therapeutic protein is less than about 10%, less than about 9%, less than about 8%, less than about 7%, less than about 6%, less than about 5%, less than about 4%, less than about 3%, less than about 2%, or less than about 1%. In some such cells, the cell is a liver cell or a hepatocyte. In some such cells, the cell is a human cell.

[0032] In another aspect, provided are methods of inserting a nucleic acid encoding a multidomain therapeutic protein comprising a delivery domain fused to a lysosomal alpha-glucosidase into a target genomic locus in a cell or a population of cells, comprising administering to the cell or the population of cells any of the above compositions, wherein the nuclease agent cleaves the nuclease target site in the target genomic locus, and the nucleic acid construct or the nucleic acid encoding the multidomain therapeutic protein is inserted into the target genomic locus. In some such methods, the percentage of unintended transcripts from the target genomic locus containing comprising the inserted nucleic acid construct or nucleic acid encoding the multidomain therapeutic protein is less than about 10%, less than about 9%, less than about 8%, less than about 7%, less than about 6%, less than about 5%, less than about 4%, less than about 3%, less than about 2%, or less than about 1%. In another aspect, provided are methods of expressing a multidomain therapeutic protein comprising a delivery domain fused to a lysosomal alpha-glucosidase in a cell or a population of cells, comprising administering to the cell or the population of cells any of the above compositions, wherein the coding sequence for the multidomain therapeutic protein is operably linked to a promoter in the nucleic acid construct and is expressed in the cell or population of cells. In another aspect, provided are methods of expressing a multidomain therapeutic protein comprising a delivery domain fused to a lysosomal alpha-glucosidase from a target genomic locus in a cell or a population of cells, comprising administering to the cell or the population of cells any of the above compositions, wherein the nuclease agent cleaves the nuclease target site in the target genomic locus, the nucleic acid construct or the coding sequence for the multidomain therapeutic protein is inserted into the target genomic locus to create a modified target genomic locus, and the multidomain therapeutic protein comprising the delivery domain fused to the lysosomal alpha-glucosidase is expressed from the modified target genomic locus. In some such methods, the percentage of unintended transcripts from the target genomic locus containing comprising the inserted nucleic acid construct or coding sequence for the multidomain therapeutic protein is less than about 10%, less than about 9%, less than about 8%, less than about 7%, less than about 6%, less than about 5%, less than about 4%, less than about 3%, less than about 2%, or less than about 1%.

[0033] In some such methods, the cell is a liver cell or a hepatocyte or the population of cells is a population of liver cells or hepatocytes. In some such methods, the cell is a human cell or the population of cells is a population of human cells. In some such methods, the cell is a neonatal cell or the population of cells is a population of neonatal cells. In some such methods, the neonatal cell or the population of neonatal cells is from a human neonatal subject within 24 weeks after birth, optionally wherein the neonatal cell or the population of neonatal cells is from a human neonatal subject within 12 weeks after birth, optionally wherein the neonatal cell or the population of neonatal cells is from a human neonatal subject within 8 weeks after birth, and optionally wherein the neonatal cell or the population of neonatal cells is from a human neonatal subject within 4 weeks after birth. In some such methods, the cell is not a neonatal cell or the population of cells is not a population of neonatal cells. In some such methods, the cell is in vitro or ex vivo or the population of cells is in vitro or ex vivo. In some such methods, the cell is in vivo in a subject or the population of cells is in vivo in a subject.

[0034] In another aspect, provided are methods of inserting a nucleic acid encoding a multidomain therapeutic protein comprising a delivery domain fused to a lysosomal alpha-glucosidase into a target genomic locus in a cell in a subject, comprising administering to the subject any of the above compositions, wherein the nuclease agent cleaves the nuclease target site in the target genomic locus, and the nucleic acid construct or the nucleic acid encoding the multidomain therapeutic protein is inserted into the target genomic locus. In some such methods, the percentage of unintended transcripts from the target genomic locus containing comprising the inserted nucleic acid construct or coding sequence for the multidomain therapeutic protein is less than about 10%, less than about 9%, less than about 8%, less than about 7%, less than about 6%, less than about 5%, less than about 4%, less than about 3%, less than about 2%, or less than about 1%. In another aspect, provided are methods of expressing a multidomain therapeutic protein comprising a delivery domain fused to a lysosomal alpha-glucosidase protein in a cell in a subject, comprising administering to the subject any of the above compositions, wherein the coding sequence for the multidomain therapeutic protein is operably linked to a promoter in the nucleic acid construct and is expressed in the cell. In another aspect, provided are methods of expressing a multidomain therapeutic protein comprising a delivery domain fused to a lysosomal alpha-glucosidase protein from a target genomic locus in a cell in a subject, comprising administering to the subject any of the above compositions, wherein the nuclease agent cleaves the nuclease target site in the target genomic locus, the nucleic acid construct or the coding sequence for the multidomain therapeutic protein is inserted into the target genomic locus to create a modified target genomic locus, and the multidomain therapeutic protein comprising the delivery domain fused to the lysosomal alpha-glucosidase is expressed from the modified target genomic locus. In some such methods, the percentage of unintended transcripts from the target genomic locus containing comprising the inserted nucleic acid construct or coding sequence for the multidomain therapeutic protein is less than about 10%, less than about 9%, less than about 8%, less than about 7%, less than about 6%, less than about 5%, less than about 4%, less than about 3%, less than about 2%, or less than about 1%.

[0035] In some such methods, the expressed multidomain therapeutic protein is delivered to and internalized by skeletal muscle and heart tissue in the subject or wherein the expressed multidomain therapeutic protein is delivered to and internalized by skeletal muscle, heart, and central nervous system tissue in the subject. In some such methods, the cell is a liver cell or a hepatocyte. In some such methods, the cell is a human cell. In some such methods, the cell is a neonatal cell. In some such methods, the neonatal subject is a human subject within 24 weeks after birth, optionally wherein the neonatal subject is a human subject within 12 weeks after birth, optionally wherein the neonatal subject is a human subject within 8 weeks after birth, and optionally wherein the neonatal subject is a human subject within 4 weeks after birth. In some such methods, the cell is not a neonatal cell.

[0036] In another aspect, provided are methods of treating a lysosomal alpha-glucosidase deficiency in a subject in need thereof, comprising administering to the subject any of the above compositions, wherein the coding sequence for the multidomain therapeutic protein is operably linked to a promoter in the nucleic acid construct and is expressed in the subject. In another aspect, provided are methods of treating a lysosomal alpha-glucosidase deficiency in a subject in need thereof, comprising administering to the subject any of the above compositions, wherein the nuclease agent cleaves the nuclease target site in the target genomic locus, the nucleic acid construct or the coding sequence for the multidomain therapeutic protein is inserted into the target genomic locus to create a modified target genomic locus, and the multidomain therapeutic protein comprising the delivery domain fused to the lysosomal alpha-glucosidase is expressed from the modified target genomic locus. In some such methods, the percentage of unintended transcripts from the target genomic locus containing comprising the inserted nucleic acid construct or coding sequence for the multidomain therapeutic protein is less than about 10%, less than about 9%, less than about 8%, less than about 7%, less than about 6%, less than about 5%, less than about 4%, less than about 3%, less than about 2%, or less than about 1%. In another aspect, provided are methods of reducing glycogen accumulation in a tissue in a subject in need thereof, comprising administering to the subject any of the above compositions, wherein the coding sequence for the multidomain therapeutic protein is operably linked to a promoter in the nucleic acid construct and is expressed in the subject and reduces glycogen accumulation in the tissue. In another aspect, provided are methods of reducing glycogen accumulation in a tissue in a subject in need thereof, comprising administering to the subject any of the above compositions, wherein the nuclease agent cleaves the nuclease target site in the target genomic locus, the nucleic acid construct or the coding sequence for the multidomain therapeutic protein is inserted into the target genomic locus to create a modified target genomic locus, and the multidomain therapeutic protein comprising the delivery domain fused to the lysosomal alpha-glucosidase is expressed from the modified target genomic locus and reduces glycogen accumulation in the tissue. In some such methods, the percentage of unintended transcripts from the target genomic locus containing comprising the inserted nucleic acid construct or coding sequence for the multidomain therapeutic protein is less than about 10%, less than about 9%, less than about 8%, less than about 7%, less than about 6%, less than about 5%, less than about 4%, less than about 3%, less than about 2%, or less than about 1%. In some such methods, the subject has Pompe disease. In another aspect, provided are methods of treating Pompe disease in a subject in need thereof, comprising administering to the subject any of the above compositions, wherein the coding sequence for the multidomain therapeutic protein is operably linked to a promoter in the nucleic acid construct and is expressed in the subject, thereby treating the Pompe disease. In another aspect, provided are methods of treating Pompe disease in a subject in need thereof, comprising administering to the subject any of the above compositions, wherein the nuclease agent cleaves the nuclease target site in the target genomic locus, the nucleic acid construct or the coding sequence for the multidomain therapeutic protein is inserted into the target genomic locus to create a modified target genomic locus, and the multidomain therapeutic protein comprising the delivery domain fused to the lysosomal alpha-glucosidase is expressed from the modified target genomic locus, thereby treating the Pompe disease. In some such methods, the percentage of unintended transcripts from the target genomic locus containing comprising the inserted nucleic acid construct or coding sequence for the multidomain therapeutic protein is less than about 10%, less than about 9%, less than about 8%, less than about 7%, less than about 6%, less than about 5%, less than about 4%, less than about 3%, less than about 2%, or less than about 1%.

[0037] In some such methods, the Pompe disease is infantile-onset Pompe disease. In some such methods, the Pompe disease is late-onset Pompe disease. In some such methods, the subject is a human subject. In some such methods, the subject is a neonatal subject, optionally wherein the neonatal subject is a human subject within 24 weeks after birth, within 12 weeks after birth, within 8 weeks after birth, or within 4 weeks after birth. In some such methods, the subject is not a neonatal subject. In some such methods, the method results in a therapeutically effective level of circulating multidomain therapeutic protein or lysosomal alpha-glucosidase in the subject. In some such methods, the method reduces glycogen accumulation in skeletal muscle, heart tissue, or central nervous system tissue in the subject, optionally wherein the method reduces glycogen accumulation in skeletal muscle, heart tissue, and central nervous system tissue in the subject, optionally wherein the method results in reduced glycogen levels in skeletal muscle, heart, and central nervous system tissue in the subject comparable to wild type levels at the same age, or wherein the method reduces glycogen accumulation in skeletal muscle or heart tissue in the subject, optionally wherein the method reduces glycogen accumulation in skeletal muscle and heart tissue in the subject, optionally wherein the method results in reduced glycogen levels in skeletal muscle and heart tissue in the subject comparable to wild type levels at the same age. In some such methods, the method improves muscle strength in the subject or prevents loss of muscle strength in the subject compared to a control subject. In some such methods, the method results in the subject having muscle strength comparable to wild type levels at the same age.

[0038] In another aspect, provided are methods of preventing or reducing the onset of a sign or symptom of Pompe disease in a subject in need thereof, comprising administering to the subject any of the above compositions, wherein the coding sequence for the multidomain therapeutic protein is operably linked to a promoter in the nucleic acid construct and is expressed in the subject, thereby preventing or reducing the onset of a sign or symptom of the Pompe disease in the subject. In another aspect, provided are methods of preventing or reducing the onset of a sign or symptom of Pompe disease in a subject in need thereof, comprising administering to the subject any of the above compositions, wherein the nuclease agent cleaves the nuclease target site, the nucleic acid construct or the coding sequence for the multidomain therapeutic protein is inserted into the target genomic locus to create a modified target genomic locus, and the multidomain therapeutic protein comprising the delivery domain fused to the lysosomal alpha-glucosidase is expressed from the modified target genomic locus, thereby preventing or reducing the onset of a sign or symptom of the Pompe disease in the subject. In some such methods, the percentage of unintended transcripts from the target genomic locus containing comprising the inserted nucleic acid construct or coding sequence for the multidomain therapeutic protein is less than about 10%, less than about 9%, less than about 8%, less than about 7%, less than about 6%, less than about 5%, less than about 4%, less than about 3%, less than about 2%, or less than about 1%.

[0039] In some such methods, the Pompe disease is infantile-onset Pompe disease. In some such methods, the Pompe disease is late-onset Pompe disease. In some such methods, the method results in a therapeutically effective level of circulating multidomain therapeutic protein or lysosomal alpha-glucosidase in the subject. In some such methods, the method prevents or reduces glycogen accumulation in skeletal muscle, heart, or central nervous system tissue in the subject. In some such methods, the method prevents or reduces glycogen accumulation in skeletal muscle, heart, and central nervous system tissue in the subject, or wherein the method prevents or reduces glycogen accumulation in skeletal muscle and heart tissue in the subject. In some such methods, the subject is a human subject. In some such methods, the subject is a neonatal subject. In some such methods, the neonatal subject is a human subject within 24 weeks after birth, optionally wherein the neonatal subject is a human subject within 12 weeks after birth, optionally wherein the neonatal subject is a human subject within 8 weeks after birth, and optionally wherein the neonatal subject is a human subject within 4 weeks after birth. In some such methods, the subject is not a neonatal subject.

[0040] In some such methods, the method results in increased expression of the multidomain therapeutic protein in the subject compared to a method comprising administering an episomal expression vector encoding the multidomain therapeutic protein to a control subject. In some such methods, the method results in increased serum levels of the multidomain therapeutic protein in the subject compared to a method comprising administering an episomal expression vector encoding the multidomain therapeutic protein to a control subject. In some such methods, the method results in serum levels of the multidomain therapeutic protein in the subject of at least about 1 μg/mL, at least about 2 μg/mL, at least about 3 μg/mL, at least about 4 μg/mL, at least about 5 μg/mL, at least about 6 μg/mL, at least about 7 μg/mL, at least about 8 μg/mL, at least about 9 μg/mL, or at least about 10 μg/mL. In some such methods, the method results in serum levels of the multidomain therapeutic protein in the subject of at least about 2 μg/mL or at least about 5 μg/mL. In some such methods, the method results in serum levels of the multidomain therapeutic protein in the subject of between about 2 μg/mL and about 30 μg/mL or between about 2 μg/mL and about 20 μg/mL. In some such methods, the method results in serum levels of the multidomain therapeutic protein in the subject of between about 5 μg/mL and about g/mL or between about 5 μg/mL and about 20 μg/mL. In some such methods, the method achieves lysosomal alpha-glucosidase activity levels of at least about 40% of normal, at least about 45% of normal, at least about 50%, at least about 60%, at least about 70%, at least about 80%, at least about 90%, or 100% of normal. In some such methods, (I) the subject has infantile-onset Pompe disease, and the method achieves lysosomal alpha-glucosidase expression or activity levels of at least about 1% or more than about 1% of normal; or (II) the subject has late-onset Pompe disease, and the method achieves lysosomal alpha-glucosidase expression or activity levels of at least about 40% of normal or more than about 40% of normal. In some such methods, the expression or activity of the multidomain therapeutic protein is at least 50% of the expression or activity of the multidomain therapeutic protein at a peak level of expression measured for the subject at 24 weeks after the administering. In some such methods, the expression or activity of the multidomain therapeutic protein is at least 50% of the expression or activity of the multidomain therapeutic protein at a peak level of expression measured for the subject at one year after the administering. In some such methods, the expression or activity of the multidomain therapeutic protein is at least 60% of the expression or activity of the multidomain therapeutic protein at a peak level of expression measured for the subject at 24 weeks after the administering. In some such methods, the expression or activity of the multidomain therapeutic protein is at least 50% of the expression or activity of the multidomain therapeutic protein at a peak level of expression measured for the subject at two years after the administering. In some such methods, the expression or activity of the multidomain therapeutic protein is at least 60% of the expression or activity of the multidomain therapeutic protein at a peak level of expression measured for the subject at 2 years after the administering. In some such methods, the expression or activity of the multidomain therapeutic protein is at least 60% of the expression or activity of the multidomain therapeutic protein at a peak level of expression measured for the subject at 24 weeks after the administering.

[0041] In some such methods, the method further comprises assessing preexisting AAV immunity in the subject prior to administering the nucleic acid construct to the subject. In some such methods, the preexisting AAV immunity is preexisting AAV8 immunity. In some such methods, assessing preexisting AAV immunity comprises assessing immunogenicity using a total antibody immune assay or a neutralizing antibody assay.

[0042] In some such methods, the nucleic acid construct is administered simultaneously with the nuclease agent or the one or more nucleic acids encoding the nuclease agent. In some such methods, the nucleic acid construct is not administered simultaneously with the nuclease agent or the one or more nucleic acids encoding the nuclease agent. In some such methods, the nucleic acid construct is administered prior to the nuclease agent or the one or more nucleic acids encoding the nuclease agent. In some such methods, the nucleic acid construct is administered after the nuclease agent or the one or more nucleic acids encoding the nuclease agent.

### BRIEF DESCRIPTION OF THE FIGURES

[0043] FIG. 1 shows amino acid sequences of various anti-human transferrin receptor scFv molecules in Vₖ-3×G₄S(SEQ ID NO: 616)-V_{H} format.

[0044] FIGS. 2A-2C show anti-human TFRC scFv antibody clones deliver GAA to the cerebrum of Tfrc^{hum} mice. Anti-human TfR:GAA molecules 69261, 69329, 12839, 12841, 12843 and 12845 (FIG. 2A) 69348, 12795, 12799, 12801, 12850 and 12798 (FIG. 2B); and 12802, 69340, 12847, 12848, 69307 and 69323 (FIG. 2C) were tested. Each lane=1 mouse. Delivery by HDD.

[0045] FIG. 3 shows a subset of anti-hTFRC antibodies (12798, 12850, 69323, 12841, 12843, 12845, 12847, 12848, 12799, 69307 and 12839) delivered mature GAA to the brain parenchyma in scfv:GAA format (delivery by HDD). Lane E corresponds to endothelium and Lane P corresponds to parenchyma. Ratio of affinity for mfTfR:human TfR are indicated below the image (mf refers to Macaca fascicularis monkey).

[0046] FIG. 4 shows anti-hTFRC antibodies (12799, 12843, 12847 and 12839) delivered mature GAA to the brain parenchyma in scfv:GAA format (AAV8 episomal liver depot gene therapy). Lane E corresponds to endothelium and Lane P corresponds to parenchyma.

[0047] FIG. 5 shows episomalAAV8 liver depot anti-hTFRC scfv:GAA antibodies delivered GAA protein to CNS (cerebellum, cerebrum, spinal cord), heart, and muscle (quadricep) in Gaa^{-/-}/Tfrc^{hum} mice.

[0048] FIG. 6 shows episomal AAV8 liver depot anti-hTFRC scfv:GAA antibodies (12839, 12843 and 12847) rescued glycogen storage in central nervous system (CNS) (cerebellum, cerebrum, spinal cord), heart, and muscle (quadricep) in Gaa^{-/-}/Tfrc^{hum} mice.

[0049] FIGS. 7A-7D show episomal AAV8 liver depot anti-hTFRC scfv:GAA antibodies (12847, 12843 and 12799) rescued glycogen storage in brain (brain thalamus (FIG. 7A), brain cerebral cortex (FIG. 7B), brain hippocampus CA1 (FIG. 7C)) and muscle (quadricep (FIG. 7D)) in Gaa^{-/-}/Tfrc^{hum} mice.

[0050] FIG. 8 shows albumin insertion of anti-hTFRC 12847scfv:GAA delivers mature GAA protein to CNS and muscle of Pompe model mice.

[0051] FIG. 9 shows albumin insertion of anti-hTFRC 12847scfv:GAA rescues glycogen storage in CNS and muscle of Pompe model mice. One Way ANOVA (* p<0.01; **p<0.001; ***p<0.0001).

[0052] FIG. 10 shows GAA activity in serum following Cas9-mediated insertion of AAV-delivered anti-TfR1:GAA or anti-CD63:GAA into the cynomolgus monkey albumin locus. Vehicle-only was used as a negative control. One unit of GAA activity is defined as the amount of enzyme that generates 1.0 μmol of 4-MU per min at pH 4.5 at 37° C. Error bars are SEM. N=1 for vehicle; N=2-4 for all others.

[0053] FIG. 11 shows albumin insertion of anti-hTFRC 12847scfv:GAA delivers mature GAA protein to CNS and muscle of cynomolgus monkeys. For the bar graphs, mature GAA was quantified by western blot of tissue lysates, and error bars are SD.

[0054] FIG. 12 shows the interaction of Mammarenavirus machupoense GP1 protein (PDB 3KAS), human ferritin (PDB 6GSR), Plasmodium vivax Sal-1 PvRBP2b protein (PDB 6D04), human HFE protein (PDB 1DE4), and human transferrin (PDB 1SUV) molecules superimposed on two TfR molecules in a symmetrical unit. For Mammarenavirus machupoense GP1 protein and human ferritin, only one copy in the symmetrical unit is shown to reduce complexity of the figure for clear view.

[0055] FIG. 13 depicts Hydrogen-Deuterium Exchange Mass Spectrometry (HDX) protections for the antibodies tested in HDX-MS experiments can be assigned to 5 regions in TfR (PDB 1SUV).

[0056] FIG. 14 illustrates TfR regions protected by REGN17513, a representation of antibodies that cause HDX protections in TfR apical domain that overlap with Mammarenavirus machupoense GP1 protein, human ferritin, and Plasmodium vivax PvRBP2b protein binding sites.

[0057] FIG. 15 illustrates TfR regions protected by REGN17510, a representation of antibodies with HDX protections in TfR apical domain that are not shared by other TfR binding partners shown in FIG. 15.

[0058] FIG. 16 illustrates TfR regions protected by REGN17515, a representation of antibodies with HDX protections in TfR apical domain that share binding sites with human ferritin and Plasmodium vivax Sal-1 PvRBP2b protein.

[0059] FIG. 17 illustrates TfR regions protected by REGN17514, a representation of antibodies with HDX protections in TfR protease-like domain and share binding sites with Plasmodium vivax Sal-1 PvRBP2b protein.

[0060] FIG. 18 illustrates TfR regions protected by REGN17508, a representation of antibodies with HDX protections in TfR protease-like domain. This region is not utilized by other TfR interacting molecules shown in FIG. 18.

[0061] FIGS. 19A and 19B show GAA enzymatic activity in the media after insertion of various anti-TfR:GAA insertion templates (CpG depleted and native) into the albumin locus of primary human hepatocytes after delivery by rAAV2.

[0062] FIG. 20A shows western blots showing that anti-human TfR antibody clones (0 CpG and native) deliver GAA to the brain (cerebrum) of 3-month-old Gaa^{-/-}/Tfrc^{hum} mice or Gaa^{-/-}/CD63^{hum} mice dosed intravenously with LNP-g666 (3 mg/kg) and various recombinant AAV8 anti-TfR:GAA or AAV8 anti-CD63:GAA insertion templates. Each lane=1 mouse.

[0063] FIG. 20B shows that albumin insertion of anti-hTfR:GAA rescues glycogen storage in cerebrum, quadriceps, diaphragm, and heart in Gaa^{-/-}/Tfrc^{hum} mice or Gaa^{-/-}/CD63^{hum} mice dosed intravenously with LNP-g666 (3 mg/kg) and various recombinant AAV8 anti-TfR:GAA or AAV8 anti-CD63:GAA insertion templates. Glycogen levels were measured at 3 weeks post-administration. Wt untreated mice were a positive control, and Gaa^{-/-} untreated mice were a negative control.

[0064] FIG. 21 shows levels of anti-CD63:GAA in the serum over a 10-month time course following administration of LNP-g666 (1 mg/kg) and a recombinant AAV8 anti-CD63:GAA insertion template (1.2e13 vg/kg) (“Insertion”) or following administration of episomal AAV encoding of anti-CD63:GAA (4e12 vg/kg) (“Episomal”) to adult Pompe disease model male and female mice (n=12; GAA^{-/-}; CD63 hu/hu).

[0065] FIG. 22 shows glycogen levels in the heart, quadricep, diaphragm, and spinal cord in Pompe disease model mice (GAA^{-/-}; CD63^{hu/hu}) at 10 months after administration of LNP-g666 and a recombinant AAV8 anti-CD63:GAA insertion template or at 10 months after administration of episomal AAV encoding anti-CD63:GAA to adult Pompe disease model male and female mice (n=12; GAA^{-/-}; CD63^{hu/hu}). Wild type GAA mice (GAA^{+/+}; CD63^{hu/hu}; n=4) and untreated Pompe disease model mice (n=4) were used as controls. The horizontal dotted line is the lower limit of detection of the assay.

[0066] FIGS. 23A-23B show levels of anti-CD63:GAA in the serum over a 15-month time course following administration of LNP-g666 and a recombinant AAV8 anti-CD63:GAA insertion template (n=10; male and female; “Insertion”) or following administration of episomal AAV encoding of anti-CD63:GAA (n=6; male and female; “Episomal”) to neonatal (P1) Pompe disease model mice (GAA^{-/-}; CD63^{hu/hu}). The horizontal dotted line is the lower limit of detection of the assay. The error bars in FIG. 23A are ±SD, and the error bars in FIG. 23B are ±SEM.

[0067] FIG. 24A shows glycogen levels in the heart, quadricep, gastrocnemius, and diaphragm in Pompe disease model mice (GAA^{-/-}; CD63^{hu/hu}) at 3 months after administration of LNP-g666 and a recombinant AAV8 anti-CD63:GAA insertion template (n=5; male and female, “I”) or at 3 months after administration of episomal AAV encoding anti-CD63:GAA (n=3; male and female, “E”) to neonatal (P1) mice. Untreated Pompe disease model mice were used as controls.

[0068] FIG. 24B shows glycogen levels in the heart, quadricep, gastrocnemius, diaphragm, cerebrum, and spinal cord in Pompe disease model mice (GAA^{-/-}; CD63^{hu/hu}) at 15 months after administration of LNP-g666 and a recombinant AAV8 anti-CD63:GAA insertion template (n=10; male and female, “I”) or at 15 months after administration of episomal AAV encoding anti-CD63:GAA (n=6; male and female, “E”) to neonatal (P1) mice. Untreated Pompe disease model mice (“U”) and wild type mice (“W”) were used as controls.

[0069] FIG. 25 shows grip strength in Pompe disease model mice (GAA^{-/-}; CD63^{hu/hu}) at 15 months after administration of LNP-g666 and a recombinant AAV8 anti-CD63:GAA insertion template (n=10; male and female, “P1 insertion AAV+LNP”) or at 15 months after administration of episomal AAV encoding anti-CD63:GAA (n=6; male and female, “P1 episomal AAV”) to neonatal (P1) mice. Wild type GAA mice (GAA^{+/+}; CD63^{hu/hu}; “Wild type”) and untreated Pompe disease model mice (“Untreated KO”) were used as controls.

[0070] FIG. 26 shows IFNα responses as measured by an IFNα ELISA in a primary human plasmacytoid DC-based assay. Various rAAV6 CpG-depleted anti-CD63:GAA templates were tested as compared to the first generation (non-CpG-depleted) anti-CD63:GAA template. rAAV6-GFP was used as a positive control, and a CpG-depleted (0 CpG) F9 template was used as a negative control.

[0071] FIG. 27 shows GAA enzymatic activity in the media after insertion of various anti-CD63:GAA and anti-TfR:GAA insertion templates into the albumin locus of primary human hepatocytes after delivery by rAAV2.

[0072] FIG. 28 shows GAA enzymatic activity in the media after insertion of various anti-CD63:GAA insertion templates into the albumin locus of primary human hepatocytes after delivery by rAAV6.

[0073] FIGS. 29A-29B show GAA serum expression in GAA^{-/-} mice following administration of LNP-g666 and various recombinant AAV8 anti-CD63:GAA insertion templates. Untreated KO and untreated WT mice were used as controls.

[0074] FIG. 30A shows GAA activity in serum measured using a fluorometric substrate assay in cynomolgus macaques that were administered recombinant AAV8 containing a CpG depleted anti-CD63:GAA template and LNP-g9860. Three different AAV8 doses were used (0.3e13 vg/kg, 1.5e13 vg/kg, and 5.6e13 vg/kg) with a 3 mg/kg LNP dose. N=1 in the vehicle control group, and N=3 in the dosed groups.

[0075] FIG. 30B shows expression of mature GAA in tissue lysates from cynomolgus macaques that were administered recombinant AAV8 containing a CpG depleted anti-CD63:GAA template and LNP-g9860. Three different AAV8 doses were used (0.3e13 vg/kg, 1.5e13 vg/kg, and 5.6e13 vg/kg) with a 3 mg/kg LNP dose. N=1 in the vehicle control group, and N=3 in the dosed groups. Tissues were collected at sacrifice (Day 89) and probed by western blot for presence of a 76 kDa lysosomal form of GAA.

[0076] FIG. 31 shows a schematic of LNP-g9860, which is a lipid nanoparticle containing Cas9 mRNA and sgRNA 9860 targeting human albumin (ALB) intron 1, and a recombinant AAV8 (rAAV8) capsid packaged with an anti-CD63:GAA insertion template.

[0077] FIG. 32 shows a schematic of targeting of GAA to the lysosome via fusion to anti-CD63 scFv.

[0078] FIG. 33 shows a schematic for CRISPR/Cas9-mediated insertion of an anti-CD63:GAA insertion template at the ALB locus. The human ALB locus is depicted, with the Cas9 cut site denoted with scissors. The splice acceptor site flanking the anti-CD63:GAA transgene in the insertion template is depicted. Following insertion and transcription driven by the endogenous ALB promoter, splicing between ALB exon 1 and the inserted anti-CD63:GAA DNA template occurs, diagrammed in dashed lines, to produce a hybrid ALB-anti-CD63: GAA mRNA. The ALB signal peptide promotes secretion of anti-CD63:GAA and is removed during protein maturation to yield anti-CD63:GAA in plasma.

[0079] FIG. 34 shows a schematic of LNP-g9860, which is a lipid nanoparticle containing Cas9 mRNA and sgRNA 9860 targeting human albumin (ALB) intron 1, and a recombinant AAV8 (rAAV8) capsid packaged with an anti-TfR:GAA insertion template.

[0080] FIG. 35 shows a schematic of targeting of GAA through multiple paths via fusion to anti-TfR scFv.

[0081] FIG. 36 shows a schematic for CRISPR/Cas9-mediated insertion of an anti-TfR:GAA insertion template at the ALB locus. The human ALB locus is depicted, with the Cas9 cut site denoted with scissors. The splice acceptor site flanking the anti-TfR:GAA transgene in the insertion template is depicted. Following insertion and transcription driven by the endogenous ALB promoter, splicing between ALB exon 1 and the inserted anti-TfR:GAA DNA template occurs, diagrammed in dashed lines, to produce a hybrid ALB-anti-TfR:GAA mRNA. The ALB signal peptide promotes secretion of anti-TfR:GAA and is removed during protein maturation to yield anti-TfR:GAA in plasma.

[0082] FIG. 37 shows ALB-anti-CD63: GAA transcripts identified in cynomolgus monkeys. During construct VVT1254-LNP-g9860-mediated gene insertion, the anti-CD63:GAA DNA template, supplied by construct VVT1254, is inserted into intron 1 of the ALB gene. The polyadenylation sequence following the anti-CD63:GAA transgene is labeled as pA. RNA sequencing analysis was performed to identify the splicing patterns in ALB-anti-CD63: GAA fusion transcripts produced in PHH incubated with construct VVT1254-LNP-g9860. The intended ALB-anti-CD63:GAA fusion transcripts have only 1 splicing event from ALB exon 1 to the splice acceptor site encoded within the inserted anti-CD63:GAA DNA template (intended transcript). Cryptic splice donor or acceptor sites that resulted in unintended transcripts are identified by arrow heads at the positions indicated. The unintended transcript, formed by splicing from nucleotide position 3078 to ALB exon 2, is shown as an example.

[0083] FIG. 38 shows GAA activity in supernatants from PXB human hepatocytes treated with LNP-g9860+AAVs encoding anti-CD63:GAA gene insertion templates with various modifications to cryptic splice sites and polyA sequences.

[0084] FIG. 39 shows GAA activity in supernatants from PXB human hepatocytes treated with LNP-g9860+AAVs encoding anti-TfR:GAA gene insertion templates with various modifications to cryptic splice sites and polyA sequences.

[0085] FIG. 40 shows GAA activity in supernatants from PXB human hepatocytes treated with LNP-g9860+AAVs encoding anti-CD63:GAA gene insertion templates with various modifications to cryptic splice sites and polyA sequences as compared to the original anti-CD63:GAA gene insertion template.

[0086] FIG. 41 shows GAA activity in supernatants from PXB human hepatocytes treated with LNP-g9860+AAVs encoding anti-TfR:GAA gene insertion templates with various modifications to cryptic splice sites and polyA sequences as compared to the original anti-TfR:GAA gene insertion template.

[0087] FIG. 42 shows the experimental setup for anti-TfR:GAA template validation in Tfrc^{hum/hum};Gaa^{-/-} mice.

[0088] FIG. 43 shows quantification of transgene anti-TfR:GAA DNA in liver nucleotide preps and quantification of anti-TfR:GAA mRNA expression in liver by Tagman using standard protocols.

[0089] FIG. 44 shows western blots showing that anti-human TfR antibody clones with mutations to remove cryptic splice sites and with different polyA sequences deliver GAA to the brain (cerebellum, cerebrum), muscle (quad), liver, and serum of 4-month-old Gaa^{-/-}/Tfrc^{hum} mice dosed intravenously with LNP-g666 (3 mg/kg) and various recombinant AAV8 anti-TfR:GAA insertion templates. Each lane=1 mouse.

[0090] FIGS. 45A-45B show that albumin insertion of anti-human TfR antibody clones with mutations to remove cryptic splice sites and with different polyA sequences rescues glycogen storage in brain (FIG. 45A) and muscle (FIG. 45B) in Gaa^{-/-}/Tfrc^{hum} mice dosed intravenously with LNP-g666 (3 mg/kg) and various recombinant AAV8 anti-TfR:GAA insertion templates. Glycogen levels were measured at 3 weeks post-administration. Wt untreated mice were a positive control, and Gaa^{-/-} untreated mice were a negative control.

[0091] FIG. 46 shows the experimental setup for anti-TfR:GAA template validation in albumin humanized mice.

[0092] FIGS. 47A-47C show western blots (FIG. 47A) and quantification of bands in the western blots (FIGS. 47B-47C) showing expression of anti-human TfR:GAA in serum and liver of 3-month-old humanized albumin mice dosed intravenously with LNP-g9860 (3 mg/kg) and various recombinant AAV8 anti-TfR:GAA insertion templates (3e12 vg/kg). Each lane in FIG. 47A=1 mouse.

[0093] FIG. 48 shows quantification of transgene anti-TfR:GAA DNA in liver nucleotide preps and quantification of anti-TfR:GAA mRNA expression in liver by Tagman using standard protocols.

### DEFINITIONS

[0094] The terms “protein,” “polypeptide,” and “peptide,” used interchangeably herein, include polymeric forms of amino acids of any length, including coded and non-coded amino acids and chemically or biochemically modified or derivatized amino acids. The terms also include polymers that have been modified, such as polypeptides having modified peptide backbones. The term “domain” refers to any part of a protein or polypeptide having a particular function or structure.

[0095] Proteins are said to have an “N-terminus” and a “C-terminus.” The term “N-terminus” relates to the start of a protein or polypeptide, terminated by an amino acid with a free amine group (—NH2). The term “C-terminus” relates to the end of an amino acid chain (protein or polypeptide), terminated by a free carboxyl group (—COOH).

[0096] The terms “nucleic acid” and “polynucleotide,” used interchangeably herein, include polymeric forms of nucleotides of any length, including ribonucleotides, deoxyribonucleotides, or analogs or modified versions thereof. They include single-, double-, and multi-stranded DNA or RNA, genomic DNA, cDNA, DNA-RNA hybrids, and polymers comprising purine bases, pyrimidine bases, or other natural, chemically modified, biochemically modified, non-natural, or derivatized nucleotide bases.

[0097] Nucleic acids are said to have “5′ ends” and “3′ ends” because mononucleotides are reacted to make oligonucleotides in a manner such that the 5′ phosphate of one mononucleotide pentose ring is attached to the 3′ oxygen of its neighbor in one direction via a phosphodiester linkage. An end of an oligonucleotide is referred to as the “5′ end” if its 5′ phosphate is not linked to the 3′ oxygen of a mononucleotide pentose ring. An end of an oligonucleotide is referred to as the “3′ end” if its 3′ oxygen is not linked to a 5′ phosphate of another mononucleotide pentose ring. A nucleic acid sequence, even if internal to a larger oligonucleotide, also may be said to have 5′ and 3′ ends. In either a linear or circular DNA molecule, discrete elements are referred to as being “upstream” or 5′ of the “downstream” or 3′ elements.

[0098] The term “genomically integrated” refers to a nucleic acid that has been introduced into a cell such that the nucleotide sequence integrates into the genome of the cell. Any protocol may be used for the stable incorporation of a nucleic acid into the genome of a cell.

[0099] The term “viral vector” refers to a recombinant nucleic acid that includes at least one element of viral origin and includes elements sufficient for or permissive of packaging into a viral vector particle. The vector and/or particle can be utilized for the purpose of transferring DNA, RNA, or other nucleic acids into cells in vitro, ex vivo, or in vivo. Numerous forms of viral vectors are known.

[0100] The term “isolated” with respect to cells, tissues (e.g., liver samples), proteins, and nucleic acids includes cells, tissues (e.g., liver samples), proteins, and nucleic acids that are relatively purified with respect to other bacterial, viral, cellular, or other components that may normally be present in situ, up to and including a substantially pure preparation of the cells, tissues (e.g., liver samples), proteins, and nucleic acids. The term “isolated” also includes cells, tissues (e.g., liver samples), proteins, and nucleic acids that have no naturally occurring counterpart, have been chemically synthesized and are thus substantially uncontaminated by other cells, tissues (e.g., liver samples), proteins, and nucleic acids, or has been separated or purified from most other components (e.g., cellular components) with which they are naturally accompanied (e.g., other cellular proteins, polynucleotides, or cellular components).

[0101] The term “wild type” includes entities having a structure and/or activity as found in a normal (as contrasted with mutant, diseased, altered, or so forth) state or context. Wild type genes and polypeptides often exist in multiple different forms (e.g., alleles).

[0102] The term “endogenous sequence” refers to a nucleic acid sequence that occurs naturally within a cell or animal. For example, an endogenous ALB sequence of a human refers to a native ALB sequence that naturally occurs at the ALB locus in the human.

[0103] “Exogenous” molecules or sequences include molecules or sequences that are not normally present in a cell in that form. Normal presence includes presence with respect to the particular developmental stage and environmental conditions of the cell. An exogenous molecule or sequence, for example, can include a mutated version of a corresponding endogenous sequence within the cell, such as a humanized version of the endogenous sequence, or can include a sequence corresponding to an endogenous sequence within the cell but in a different form (i.e., not within a chromosome). In contrast, endogenous molecules or sequences include molecules or sequences that are normally present in that form in a particular cell at a particular developmental stage under particular environmental conditions.

[0104] The term “heterologous” when used in the context of a nucleic acid or a protein indicates that the nucleic acid or protein comprises at least two segments that do not naturally occur together in the same molecule. For example, the term “heterologous,” when used with reference to segments of a nucleic acid or segments of a protein, indicates that the nucleic acid or protein comprises two or more sub-sequences that are not found in the same relationship to each other (e.g., joined together) in nature. As one example, a “heterologous” region of a nucleic acid vector is a segment of nucleic acid within or attached to another nucleic acid molecule that is not found in association with the other molecule in nature. For example, a heterologous region of a nucleic acid vector could include a coding sequence flanked by sequences not found in association with the coding sequence in nature. Likewise, a “heterologous” region of a protein is a segment of amino acids within or attached to another peptide molecule that is not found in association with the other peptide molecule in nature (e.g., a fusion protein, or a protein with a tag). Similarly, a nucleic acid or protein can comprise a heterologous label or a heterologous secretion or localization sequence.

[0105] “Codon optimization” (i.e., “codon optimized” sequences) takes advantage of the degeneracy of codons, as exhibited by the multiplicity of three-base pair codon combinations that specify an amino acid, and generally includes a process of modifying a nucleic acid sequence for enhanced expression in particular host cells by replacing at least one codon of the native sequence with a codon that is more frequently or most frequently used in the genes of the host cell while maintaining the native amino acid sequence. For example, a nucleic acid encoding a polypeptide of interest can be modified to substitute codons having a higher frequency of usage in a given prokaryotic or eukaryotic cell, including a bacterial cell, a yeast cell, a human cell, a non-human cell, a mammalian cell, a rodent cell, a mouse cell, a rat cell, a hamster cell, or any other host cell, as compared to the naturally occurring nucleic acid sequence. Codon usage tables are readily available, for example, at the “Codon Usage Database.” These tables can be adapted in a number of ways. See Nakamura et al. (2000) Nucleic Acids Res. 28(1):292, herein incorporated by reference in its entirety for all purposes. Computer algorithms for codon optimization of a particular sequence for expression in a particular host are also available (see, e.g., Gene Forge).

[0106] The term “locus” refers to a specific location of a gene (or significant sequence), DNA sequence, polypeptide-encoding sequence, or position on a chromosome of the genome of an organism. For example, an “ALB locus” may refer to the specific location of an ALB gene, ALB DNA sequence, albumin-encoding sequence, or ALB position on a chromosome of the genome of an organism that has been identified as to where such a sequence resides. An “ALB locus” may comprise a regulatory element of an ALB gene, including, for example, an enhancer, a promoter, 5′ and/or 3′ untranslated region (UTR), or a combination thereof.

[0107] The term “gene” refers to DNA sequences in a chromosome that may contain, if naturally present, at least one coding and at least one non-coding region. The DNA sequence in a chromosome that codes for a product (e.g., but not limited to, an RNA product and/or a polypeptide product) can include the coding region interrupted with non-coding introns and sequence located adjacent to the coding region on both the 5′ and 3′ ends such that the gene corresponds to the full-length mRNA (including the 5′ and 3′ untranslated sequences). Additionally, other non-coding sequences including regulatory sequences (e.g., but not limited to, promoters, enhancers, and transcription factor binding sites), polyadenylation signals, internal ribosome entry sites, silencers, insulating sequence, and matrix attachment regions may be present in a gene. These sequences may be close to the coding region of the gene (e.g., but not limited to, within 10 kb) or at distant sites, and they influence the level or rate of transcription and translation of the gene.

[0108] The term “allele” refers to a variant form of a gene. Some genes have a variety of different forms, which are located at the same position, or genetic locus, on a chromosome. A diploid organism has two alleles at each genetic locus. Each pair of alleles represents the genotype of a specific genetic locus. Genotypes are described as homozygous if there are two identical alleles at a particular locus and as heterozygous if the two alleles differ.

[0109] A “promoter” is a regulatory region of DNA usually comprising a TATA box capable of directing RNA polymerase II to initiate RNA synthesis at the appropriate transcription initiation site for a particular polynucleotide sequence. A promoter may additionally comprise other regions which influence the transcription initiation rate. The promoter sequences disclosed herein modulate transcription of an operably linked polynucleotide. A promoter can be active in one or more of the cell types disclosed herein (e.g., a mouse cell, a rat cell, a pluripotent cell, a one-cell stage embryo, a differentiated cell, or a combination thereof). A promoter can be, for example, a constitutively active promoter, a conditional promoter, an inducible promoter, a temporally restricted promoter (e.g., a developmentally regulated promoter), or a spatially restricted promoter (e.g., a cell-specific or tissue-specific promoter). Examples of promoters can be found, for example, in WO 2013/176772, herein incorporated by reference in its entirety for all purposes.

[0110] “Operable linkage” or being “operably linked” includes juxtaposition of two or more components (e.g., a promoter and another sequence element) such that both components function normally and allow the possibility that at least one of the components can mediate a function that is exerted upon at least one of the other components. For example, a promoter can be operably linked to a coding sequence if the promoter controls the level of transcription of the coding sequence in response to the presence or absence of one or more transcriptional regulatory factors. Operable linkage can include such sequences being contiguous with each other or acting in trans (e.g., a regulatory sequence can act at a distance to control transcription of the coding sequence).

[0111] The methods and compositions provided herein employ a variety of different components. Some components throughout the description can have active variants and fragments. The term “functional” refers to the innate ability of a protein or nucleic acid (or a fragment or variant thereof) to exhibit a biological activity or function. The biological functions of functional fragments or variants may be the same or may in fact be changed (e.g., with respect to their specificity or selectivity or efficacy) in comparison to the original molecule, but with retention of the molecule's basic biological function.

[0112] The term “variant” refers to a nucleotide sequence differing from the sequence most prevalent in a population (e.g., by one nucleotide) or a protein sequence different from the sequence most prevalent in a population (e.g., by one amino acid).

[0113] The term “fragment,” when referring to a protein, means a protein that is shorter or has fewer amino acids than the full-length protein. The term “fragment,” when referring to a nucleic acid, means a nucleic acid that is shorter or has fewer nucleotides than the full-length nucleic acid. A fragment can be, for example, when referring to a protein fragment, an N-terminal fragment (i.e., removal of a portion of the C-terminal end of the protein), a C-terminal fragment (i.e., removal of a portion of the N-terminal end of the protein), or an internal fragment (i.e., removal of a portion of each of the N-terminal and C-terminal ends of the protein). A fragment can be, for example, when referring to a nucleic acid fragment, a 5′ fragment (i.e., removal of a portion of the 3′ end of the nucleic acid), a 3′ fragment (i.e., removal of a portion of the 5′ end of the nucleic acid), or an internal fragment (i.e., removal of a portion each of the 5′ and 3′ ends of the nucleic acid).

[0114] “Sequence identity” or “identity” in the context of two polynucleotides or polypeptide sequences refers to the residues in the two sequences that are the same when aligned for maximum correspondence over a specified comparison window. When percentage of sequence identity is used in reference to proteins, residue positions which are not identical often differ by conservative amino acid substitutions, where amino acid residues are substituted for other amino acid residues with similar chemical properties (e.g., charge or hydrophobicity) and therefore do not change the functional properties of the molecule. When sequences differ in conservative substitutions, the percent sequence identity may be adjusted upwards to correct for the conservative nature of the substitution. Sequences that differ by such conservative substitutions are said to have “sequence similarity” or “similarity.” Means for making this adjustment are well known. Typically, this involves scoring a conservative substitution as a partial rather than a full mismatch, thereby increasing the percentage sequence identity. Thus, for example, where an identical amino acid is given a score of 1 and a non-conservative substitution is given a score of zero, a conservative substitution is given a score between zero and 1. The scoring of conservative substitutions is calculated, e.g., as implemented in the program PC/GENE (Intelligenetics, Mountain View, California).

[0115] “Percentage of sequence identity” includes the value determined by comparing two optimally aligned sequences (greatest number of perfectly matched residues) over a comparison window, wherein the portion of the polynucleotide sequence in the comparison window may comprise additions or deletions (i.e., gaps) as compared to the reference sequence (which does not comprise additions or deletions) for optimal alignment of the two sequences. The percentage is calculated by determining the number of positions at which the identical nucleic acid base or amino acid residue occurs in both sequences to yield the number of matched positions, dividing the number of matched positions by the total number of positions in the window of comparison, and multiplying the result by 100 to yield the percentage of sequence identity. Unless otherwise specified (e.g., the shorter sequence includes a linked heterologous sequence), the comparison window is the full length of the shorter of the two sequences being compared.

[0116] Unless otherwise stated, sequence identity/similarity values include the value obtained using GAP Version 10 using the following parameters: % identity and % similarity for a nucleotide sequence using GAP Weight of 50 and Length Weight of 3, and the nwsgapdna.cmp scoring matrix; % identity and % similarity for an amino acid sequence using GAP Weight of 8 and Length Weight of 2, and the BLOSUM62 scoring matrix; or any equivalent program thereof. “Equivalent program” includes any sequence comparison program that, for any two sequences in question, generates an alignment having identical nucleotide or amino acid residue matches and an identical percent sequence identity when compared to the corresponding alignment generated by GAP Version 10.

[0117] The term “conservative amino acid substitution” refers to the substitution of an amino acid that is normally present in the sequence with a different amino acid of similar size, charge, or polarity. Examples of conservative substitutions include the substitution of a non-polar (hydrophobic) residue such as isoleucine, valine, or leucine for another non-polar residue. Likewise, examples of conservative substitutions include the substitution of one polar (hydrophilic) residue for another such as between arginine and lysine, between glutamine and asparagine, or between glycine and serine. Additionally, the substitution of a basic residue such as lysine, arginine, or histidine for another, or the substitution of one acidic residue such as aspartic acid or glutamic acid for another acidic residue are additional examples of conservative substitutions. Examples of non-conservative substitutions include the substitution of a non-polar (hydrophobic) amino acid residue such as isoleucine, valine, leucine, alanine, or methionine for a polar (hydrophilic) residue such as cysteine, glutamine, glutamic acid or lysine and/or a polar residue for a non-polar residue. Typical amino acid categorizations are summarized below.

TABLE 1
Amino Acid Categorizations.

| | | | | | |
|---|---|---|---|---|---|
| Alanine | Ala | A | Nonpolar | Neutral | 1.8 |
| Arginine | Arg | R | Polar | Positive | −4.5 |
| Asparagine | Asn | N | Polar | Neutral | −3.5 |
| Aspartic acid | Asp | D | Polar | Negative | −3.5 |
| Cysteine | Cys | C | Nonpolar | Neutral | 2.5 |
| Glutamic acid | Glu | E | Polar | Negative | −3.5 |
| Glutamine | Gln | Q | Polar | Neutral | −3.5 |
| Glycine | Gly | G | Nonpolar | Neutral | −0.4 |
| Histidine | His | H | Polar | Positive | −3.2 |
| Isoleucine | Ile | I | Nonpolar | Neutral | 4.5 |
| Leucine | Leu | L | Nonpolar | Neutral | 3.8 |
| Lysine | Lys | K | Polar | Positive | −3.9 |
| Methionine | Met | M | Nonpolar | Neutral | 1.9 |
| Phenylalanine | Phe | F | Nonpolar | Neutral | 2.8 |
| Proline | Pro | P | Nonpolar | Neutral | −1.6 |
| Serine | Ser | S | Polar | Neutral | −0.8 |
| Threonine | Thr | T | Polar | Neutral | −0.7 |
| Tryptophan | Trp | W | Nonpolar | Neutral | −0.9 |
| Tyrosine | Tyr | Y | Polar | Neutral | −1.3 |
| Valine | Val | V | Nonpolar | Neutral | 4.2 |

[0118] A “homologous” sequence (e.g., nucleic acid sequence) includes a sequence that is either identical or substantially similar to a known reference sequence, such that it is, for example, at least 50%, at least 55%, at least 60%, at least 65%, at least 70%, at least 75%, at least 80%, at least 85%, at least 90%, at least 95%, at least 96%, at least 97%, at least 98%, at least 99%, or 100% identical to the known reference sequence. Homologous sequences can include, for example, orthologous sequence and paralogous sequences. Homologous genes, for example, typically descend from a common ancestral DNA sequence, either through a speciation event (orthologous genes) or a genetic duplication event (paralogous genes). “Orthologous” genes include genes in different species that evolved from a common ancestral gene by speciation. Orthologs typically retain the same function in the course of evolution. “Paralogous” genes include genes related by duplication within a genome. Paralogs can evolve new functions in the course of evolution.

[0119] The term “in vitro” includes artificial environments and to processes or reactions that occur within an artificial environment (e.g., a test tube or an isolated cell or cell line). The term “in vivo” includes natural environments (e.g., a cell or organism or body) and to processes or reactions that occur within a natural environment. The term “ex vivo” includes cells that have been removed from the body of an individual and processes or reactions that occur within such cells.

[0120] The term “antibody,” as used herein, includes immunoglobulin molecules comprising four polypeptide chains, two heavy (H) chains and two light (L) chains inter-connected by disulfide bonds. Each heavy chain comprises a heavy chain variable region (abbreviated herein as HCVR or VH) and a heavy chain constant region. The heavy chain constant region comprises three domains, CH1, CH2 and CH3. Each light chain comprises a light chain variable region (abbreviated herein as LCVR or VL or VK) and a light chain constant region. The light chain constant region comprises one domain, CL. The VH and VL regions can be further subdivided into regions of hypervariability, termed complementarity determining regions (CDR), interspersed with regions that are more conserved, termed framework regions (FR). Each VH and VL is composed of three CDRs and four FRs, arranged from amino-terminus to carboxy-terminus in the following order: FR1, CDR1, FR2, CDR2, FR3, CDR3, FR4 (heavy chain CDRs may be abbreviated as HCDR1, HCDR2 and HCDR3; light chain CDRs may be abbreviated as LCDR1, LCDR2 and LCDR3. The term “high affinity” antibody refers to those antibodies having a binding affinity to their target of at least 10⁻⁹ M, at least 1010 M; at least 10⁻¹² M; or at least 10⁻¹² M, as measured by surface plasmon resonance, e.g., BIACORE™ or solution-affinity ELISA. The term “antibody” may encompass any type of antibody, such as, e.g., monoclonal or polyclonal. Moreover, the antibody may be or any origin, such as, e.g., mammalian or non-mammalian. In one embodiment, the antibody may be mammalian or avian. In a further embodiment, the antibody may be or human origin and may further be a human monoclonal antibody.

[0121] The phrase “bispecific antibody” includes an antibody capable of selectively binding two or more epitopes. Bispecific antibodies generally comprise two different heavy chains, with each heavy chain specifically binding a different epitope-either on two different molecules (e.g., antigens) or on the same molecule (e.g., on the same antigen). If a bispecific antibody is capable of selectively binding two different epitopes (a first epitope and a second epitope), the affinity of the first heavy chain for the first epitope will generally be at least one to two or three or four orders of magnitude lower than the affinity of the first heavy chain for the second epitope, and vice versa. The epitopes recognized by the bispecific antibody can be on the same or a different target (e.g., on the same or a different protein). Bispecific antibodies can be made, for example, by combining heavy chains that recognize different epitopes of the same antigen. For example, nucleic acid sequences encoding heavy chain variable sequences that recognize different epitopes of the same antigen can be fused to nucleic acid sequences encoding different heavy chain constant regions, and such sequences can be expressed in a cell that expresses an immunoglobulin light chain. A typical bispecific antibody has two heavy chains each having three heavy chain CDRs, followed by (N-terminal to C-terminal) a CH1 domain, a hinge, a CH2 domain, and a CH3 domain, and an immunoglobulin light chain that either does not confer antigen-binding specificity but that can associate with each heavy chain, or that can associate with each heavy chain and that can bind one or more of the epitopes bound by the heavy chain antigen-binding regions, or that can associate with each heavy chain and enable binding or one or both of the heavy chains to one or both epitopes.

[0122] The phrase “heavy chain,” or “immunoglobulin heavy chain” includes an immunoglobulin heavy chain constant region sequence from any organism, and unless otherwise specified includes a heavy chain variable domain. Heavy chain variable domains include three heavy chain CDRs and four FR regions, unless otherwise specified. Fragments of heavy chains include CDRs, CDRs and FRs, and combinations thereof. A typical heavy chain has, following the variable domain (from N-terminal to C-terminal), a CH1 domain, a hinge, a CH2 domain, and a CH3 domain. A functional fragment of a heavy chain includes a fragment that is capable of specifically recognizing an antigen (e.g., recognizing the antigen with a KD in the micromolar, nanomolar, or picomolar range), that is capable of expressing and secreting from a cell, and that comprises at least one CDR.

[0123] The phrase “light chain” includes an immunoglobulin light chain constant region sequence from any organism, and unless otherwise specified includes human kappa and lambda light chains. Light chain variable (VL) domains typically include three light chain CDRs and four framework (FR) regions, unless otherwise specified. Generally, a full-length light chain includes, from amino terminus to carboxyl terminus, a VL domain that includes FR1-CDR1-FR2-CDR2-FR3-CDR3-FR4, and a light chain constant domain. Light chains that can be used herein include, for example, those that do not selectively bind either the first or second antigen selectively bound by the antigen-binding protein. Suitable light chains include those that can be identified by screening for the most commonly employed light chains in existing antibody libraries (wet libraries or in silico), where the light chains do not substantially interfere with the affinity and/or selectivity of the antigen-binding domains of the antigen-binding proteins. Suitable light chains include those that can bind one or both epitopes that are bound by the antigen-binding regions of the antigen-binding protein.

[0124] The phrase “variable domain” includes an amino acid sequence of an immunoglobulin light or heavy chain (modified as desired) that comprises the following amino acid regions, in sequence from N-terminal to C-terminal (unless otherwise indicated): FR1, CDR1, FR2, CDR2, FR3, CDR3, FR4. A “variable domain” includes an amino acid sequence capable of folding into a canonical domain (VH or VL) having a dual beta sheet structure wherein the beta sheets are connected by a disulfide bond between a residue of a first beta sheet and a second beta sheet.

[0125] The phrase “complementarity determining region,” or the term “CDR,” includes an amino acid sequence encoded by a nucleic acid sequence of an organism's immunoglobulin genes that normally (i.e., in a wild type animal) appears between two framework regions in a variable region of a light or a heavy chain of an immunoglobulin molecule (e.g., an antibody or a T cell receptor). A CDR can be encoded by, for example, a germline sequence or a rearranged or unrearranged sequence, and, for example, by a naive or a mature B cell or a T cell. In some circumstances (e.g., for a CDR3), CDRs can be encoded by two or more sequences (e.g., germline sequences) that are not contiguous (e.g., in an unrearranged nucleic acid sequence) but are contiguous in a B cell nucleic acid sequence, for example, as the result of splicing or connecting the sequences (e.g., V-D-J recombination to form a heavy chain CDR3).

[0126] The term “antibody fragment” refers to one or more fragments of an antibody that retain the ability to specifically bind to an antigen. Examples of binding fragments encompassed within the term “antibody fragment” include (i) a Fab fragment, a monovalent fragment consisting of the VL, VH, CL and CH1 domains; (ii) a F(ab′)2 fragment, a bivalent fragment comprising two Fab fragments linked by a disulfide bridge at the hinge region; (iii) a Fd fragment consisting of the VH and CH1 domains; (iv) a Fv fragment consisting of the VL and VH domains of a single arm of an antibody, (v) a dAb fragment (Ward et al. (1989) Nature 241:544-546), which consists of a VH domain, (vi) an isolated CDR, and (vii) an scFv, which consists of the two domains of the Fv fragment, VL and VH, joined by a synthetic linker to form a single protein chain in which the VL and VH regions pair to form monovalent molecules. Other forms of single chain antibodies, such as diabodies are also encompassed under the term “antibody” (see e.g., Holliger et al. (1993) Proc. Natl. Acad. Sci. U.S.A. 90:6444-6448; Poljak et al. (1994) Structure 2:1121-1123).

[0127] The phrase “Fc-containing protein” includes antibodies, bispecific antibodies, immunoadhesins, and other binding proteins that comprise at least a functional portion of an immunoglobulin CH2 and CH3 region. A “functional portion” refers to a CH2 and CH3 region that can bind a Fc receptor (e.g., an FcγR; or an FcRn, i.e., a neonatal Fc receptor), and/or that can participate in the activation of complement. If the CH2 and CH3 region contains deletions, substitutions, and/or insertions or other modifications that render it unable to bind any Fc receptor and also unable to activate complement, the CH2 and CH3 region is not functional.

[0128] Fc-containing proteins can comprise modifications in immunoglobulin domains, including where the modifications affect one or more effector function of the binding protein (e.g., modifications that affect FcγR binding, FcRn binding and thus half-life, and/or CDC activity). Such modifications include, but are not limited to, the following modifications and combinations thereof, with reference to EU numbering of an immunoglobulin constant region: 238, 239, 248, 249, 250, 252, 254, 255, 256, 258, 265, 267, 268, 269, 270, 272, 276, 278, 280, 283, 285, 286, 289, 290, 292, 293, 294, 295, 296, 297, 298, 301, 303, 305, 307, 308, 309, 311, 312, 315, 318, 320, 322, 324, 326, 327, 328, 329, 330, 331, 332, 333, 334, 335, 337, 338, 339, 340, 342, 344, 356, 358, 359, 360, 361, 362, 373, 375, 376, 378, 380, 382, 383, 384, 386, 388, 389, 398, 414, 416, 419, 428, 430, 433, 434, 435, 437, 438, and 439.

[0129] For example, and not by way of limitation, the binding protein is an Fc-containing protein and exhibits enhanced serum half-life (as compared with the same Fc-containing protein without the recited modification(s)) and have a modification at position 250 (e.g., E or Q); 250 and 428 (e.g., L or F); 252 (e.g., L/Y/F/W or T), 254 (e.g., S or T), and 256 (e.g., S/R/Q/E/D or T); or a modification at 428 and/or 433 (e.g., L/R/SI/P/Q or K) and/or 434 (e.g., H/F or Y); or a modification at 250 and/or 428; or a modification at 307 or 308 (e.g., 308F, V308F), and 434. In another example, the modification can comprise a 428L (e.g., M428L) and 434S (e.g., N434S) modification; a 428L, 2591 (e.g., V259I), and a 308F (e.g., V308F) modification; a 433K (e.g., H433K) and a 434 (e.g., 434Y) modification; a 252, 254, and 256 (e.g., 252Y, 254T, and 256E) modification; a 250Q and 428L modification (e.g., T250Q and M428L); a 307 and/or 308 modification (e.g., 308F or 308P).

[0130] The term “antigen-binding protein,” as used herein, refers to a polypeptide or protein (one or more polypeptides complexed in a functional unit) that specifically recognizes an epitope on an antigen, such as a cell-specific antigen and/or a target antigen provided herein. An antigen-binding protein may be multi-specific. The term “multi-specific” with reference to an antigen-binding protein means that the protein recognizes different epitopes, either on the same antigen or on different antigens. A multi-specific antigen-binding protein provided herein can be a single multifunctional polypeptide, or it can be a multimeric complex of two or more polypeptides that are covalently or non-covalently associated with one another. The term “antigen-binding protein” includes antibodies or fragments thereof provided herein that may be linked to or co-expressed with another functional molecule, for example, another peptide or protein. For example, an antibody or fragment thereof can be functionally linked (e.g., by chemical coupling, genetic fusion, non-covalent association or otherwise) to one or more other molecular entities, such as a protein or fragment thereof to produce a bispecific or a multi-specific antigen-binding molecule with a second binding specificity.

[0131] As used herein, the term “epitope” refers to the portion of the antigen which is recognized by the multi-specific antigen-binding polypeptide. A single antigen (such as an antigenic polypeptide) may have more than one epitope. Epitopes may be defined as structural or functional. Functional epitopes are generally a subset of structural epitopes and are defined as those residues that directly contribute to the affinity of the interaction between the antigen-binding polypeptide and the antigen. Epitopes may also be conformational, that is, composed of non-linear amino acids. In certain embodiments, epitopes may include determinants that are chemically active surface groupings of molecules such as amino acids, sugar side chains, phosphoryl groups, or sulfonyl groups, and, in certain embodiments, may have specific three-dimensional structural characteristics, and/or specific charge characteristics. Epitopes formed from contiguous amino acids are typically retained on exposure to denaturing solvents, whereas epitopes formed by tertiary folding are typically lost on treatment with denaturing solvents.

[0132] The term “domain” refers to any part of a protein or polypeptide having a particular function or structure. Preferably, domains provided herein bind to cell-specific or target antigens. Cell-specific antigen- or target antigen-binding domains, and the like, as used herein, include any naturally occurring, enzymatically obtainable, synthetic, or genetically engineered polypeptide or glycoprotein that specifically binds an antigen.

[0133] The term “half-body” or “half-antibody,” which are used interchangeably, refers to half of an antibody, which essentially contains one heavy chain and one light chain. Antibody heavy chains can form dimers, thus the heavy chain of one half-body can associate with heavy chain associated with a different molecule (e.g., another half-body) or another Fc-containing polypeptide. Two slightly different Fc-domains may “heterodimerize” as in the formation of bispecific antibodies or other heterodimers, -trimers, -tetramers, and the like. See Vincent and Murini (2012) Biotechnol. J. 7(12):1444-1450; and Shimamoto et al. (2012) MAbs 4(5):586-91. In one embodiment, the half-body variable domain specifically recognizes the internalization effector and the half body Fc-domain dimerizes with an Fc-fusion protein that comprises a replacement enzyme (e.g., a peptibody).

[0134] The term “single-chain variable fragment” or “scFv” includes a single chain fusion polypeptide containing an immunoglobulin heavy chain variable region (VH) and an immunoglobulin light chain variable region (VL). In some embodiments, the VH and VL are connect by a linker sequence of 10 to 25 amino acids. ScFv polypeptides may also include other amino acid sequences, such as CL or CH1 regions. ScFv molecules can be manufactured by phage display or made by directly subcloning the heavy and light chains from a hybridoma or B-cell. See Ahmad et al. (2012) Clin. Dev. Immunol. 2012:980250, herein incorporated by reference in its entirety for all purposes.

[0135] As used herein, the term “neonatal” in the context of humans covers human subjects up to or under the age of 1 year (52 weeks), preferably up to or under the age of 24 weeks, more preferably up to or under the age of 12 weeks, more preferably up to or under the age of 8 weeks, and even more preferably up to or under the age of 4 weeks. In certain embodiments, a neonatal human subject is up to 4 weeks of age. In certain embodiments, a neonatal human subject is up to 8 weeks of age. In another embodiment, a neonatal human subject is within 3 weeks after birth. In another embodiment, a neonatal human subject is within 2 weeks after birth. In another embodiment, a neonatal human subject is within 1 week after birth. In another embodiment, a neonatal human subject is within 7 days after birth. In another embodiment, a neonatal human subject is within 6 days after birth. In another embodiment, a neonatal human subject is within 5 days after birth. In another embodiment, a neonatal human subject is within 4 days after birth. In another embodiment, a neonatal human subject is within 3 days after birth. In another embodiment, a neonatal human subject is within 2 days after birth. In another embodiment, a neonatal human subject is within 1 day after birth. The time windows disclosed above are for human subjects and are also meant to cover the corresponding developmental time windows for other animals. As used herein, a “neonatal cell” is a cell of a neonatal subject, and a population of neonatal cells is a population of cells of a neonatal subject.

[0136] As used herein, a “control” as in a control sample or a control subject is a comparator for a measurement, e.g., a diagnostic measurement of a sign or symptom of a disease. In certain embodiments, a control can be a subject sample from the same subject an earlier time point, e.g., before a treatment intervention. In certain embodiments, a control can be a measurement from a normal subject, i.e., a subject not having the disease of the treated subject, to provide a normal control, e.g., an enzyme concentration or activity in a subject sample. In certain embodiments, a normal control can be a population control, i.e., the average of subjects in the general population. In certain embodiments, a control can be an untreated subject with the same disease. In certain embodiments, a control can be a subject treated with a different therapy, e.g., the standard of care. In certain embodiments, a control can be a subject or a population of subjects from a natural history study of subjects with the disease of the subject being compared. In certain embodiments, the control is matched for certain factors to the subject being tested, e.g., age, gender. In certain embodiments, a control may be a control level for a particular lab, e.g., a clinical lab. Selection of an appropriate control is within the ability of those of skill in the art.

[0137] Compositions or methods “comprising” or “including” one or more recited elements may include other elements not specifically recited. For example, a composition that “comprises” or “includes” a protein may contain the protein alone or in combination with other ingredients. The transitional phrase “consisting essentially of” means that the scope of a claim is to be interpreted to encompass the specified elements recited in the claim and those that do not materially affect the basic and novel characteristic(s) of the claimed invention. Thus, the term “consisting essentially of” when used in a claim of this invention is not intended to be interpreted to be equivalent to “comprising.”

[0138] “Optional” or “optionally” means that the subsequently described event or circumstance may or may not occur and that the description includes instances in which the event or circumstance occurs and instances in which the event or circumstance does not.

[0139] Designation of a range of values includes all integers within or defining the range, and all subranges defined by integers within the range. For example, 5-10 nucleotides is understood as 5, 6, 7, 8, 9, or 10 nucleotides, whereas 5-10% is understood to contain 5% and all possible values through 10%.

[0140] At least 17 nucleotides of a 20 nucleotide sequence is understood to include 17, 18, 19, or 20 nucleotides of the sequence provided, thereby providing an upper limit even if one is not specifically provided as it would be clearly understood. Similarly, up to 3 nucleotides would be understood to encompass 0, 1, 2, or 3 nucleotides, providing a lower limit even if one is not specifically provided. When “at least,” “up to,” or other similar language modifies a number, it can be understood to modify each number in the series.

[0141] As used herein, “no more than” or “less than” is understood as the value adjacent to the phrase and logical lower values or integers, as logical from context, to zero. For example, a duplex region of “no more than 2 nucleotide base pairs” has a 2, 1, or 0 nucleotide base pairs. When “no more than” or “less than” is present before a series of numbers or a range, it is understood that each of the numbers in the series or range is modified.

[0142] As used herein, “detecting an analyte” and the like is understood as performing an assay in which the analyte can be detected, if present, wherein the analyte is present in an amount above the level of detection of the assay.

[0143] As used herein, “loss of function” is understood as an activity not being present, e.g., an enzyme activity not being present, for any reason. In certain embodiments, the absence of activity may be due to the absence of a protein having a function, e.g., protein is not transcribed or translated, protein is translated but not stable or not transported appropriately, either intracellularly or systemically. In certain embodiments, the absence of activity may be due to the presence of a mutation, e.g., point mutation, truncation, abnormal splicing, such that a protein is present, but not functional. A loss of function can be a partial or complete loss of function. In certain embodiments, various degrees of loss of function may be known that result in various conditions, severity of disease, or age of onset. As used herein, a loss of function is preferably not a transient loss of function, e.g., due to a stress response or other response that results in a temporary loss of a functional protein. Therapeutic interventions to correct for a loss of function of a protein may include compensation for the loss of function with the protein that is deficient, or with proteins that compensate for the loss of function, but that have a different sequence or structure than the protein for which the function is lost. It is understood that a loss of function of one protein may be compensated for by providing or altering the activity of another protein in the same biological pathway. In certain embodiments, the protein to compensate for the loss of function includes one or more of a truncation, mutation, or non-native sequence to direct trafficking of the protein, either intracellularly or systemically, to overcome the loss of function of the protein. The therapeutic intervention may or may not correct the loss of function of the protein in all cell types or tissues. The therapeutic intervention may include expression of the protein to compensate for a loss of function at a site remote from where the protein lacking function is typically expressed, e.g., where the deficiency results in dysfunction of a cell or organ. The therapeutic intervention may include expression of the protein in the liver to compensate for a loss of function at a site remote from the liver. A number of genetic mutations have been linked with specific loss of function mutations, in both humans and other species.

[0144] As used herein, “enzyme deficiency” is understood as an insufficient level of an enzyme activity due to a loss of function of the protein. An enzyme deficiency can be partial or total, and may result in differences in time of onset or severity of signs or symptoms of the enzyme deficiency depending on the level and site of the loss of function. As used herein, enzyme deficiency is preferably not a transient enzyme deficiency due to stress or other factors. A number of genetic mutations have been linked with enzyme deficiencies, in both humans and other species. In certain embodiments, enzyme deficiencies result in inborn errors of metabolism. In certain embodiments, enzyme deficiencies result in lysosomal storage diseases. In certain embodiments, enzyme deficiencies result in galactosemia. In certain embodiments, enzyme deficiencies result in bleeding disorders.

[0145] As used herein, it is understood that when the maximum amount of a value is represented by 100% (e.g., 100% inhibition or 100% encapsulation) that the value is limited by the method of detection. For example, 100% inhibition is understood as inhibition to a level below the level of detection of the assay, and 100% encapsulation is understood as no material intended for encapsulation can be detected outside the vesicles.

[0146] Unless otherwise apparent from the context, the term “about” encompasses values ±5% of a stated value. In certain embodiments, the term “about” is understood to encompass tolerated variation or error within the art, e.g., 2 standard deviations from the mean, or the sensitivity of the method used to take a measurement, or a percent of a value as tolerated in the art, e.g., with age. When “about” is present before the first value of a series, it can be understood to modify each value in the series.

[0147] The term “and/or” refers to and encompasses any and all possible combinations of one or more of the associated listed items, as well as the lack of combinations when interpreted in the alternative (“or”).

[0148] The term “or” refers to any one member of a particular list and also includes any combination of members of that list.

[0149] The singular forms of the articles “a,” “an,” and “the” include plural references unless the context clearly dictates otherwise. For example, the term “a protein” or “at least one protein” can include a plurality of proteins, including mixtures thereof.

[0150] Statistically significant means p<0.05.

[0151] In the event of a conflict between a sequence in the application and an indicated accession number or position in an accession number, the sequence in the application predominates.

### DETAILED DESCRIPTION

### I. Overview

[0152] Compositions and methods for inserting a nucleic acid encoding a multidomain therapeutic protein (e.g., GAA fusion protein) into a target genomic locus in a cell, a population of cells, or a subject (e.g., a neonatal cell, a population of neonatal cells, or a neonatal subject) or for expressing a nucleic acid encoding a multidomain therapeutic protein (e.g., GAA fusion protein) from a target genomic locus in a cell, a population of cells, or a subject (e.g., a neonatal cell, a population of neonatal cells, or a neonatal subject) are also provided. Compositions and methods for treating GAA deficiency, reducing glycogen accumulation in a tissue, treating Pompe disease, or preventing or reducing the onset of a sign or symptom of Pompe disease in a subject (e.g., a neonatal subject) are provided. Also provided are cells or populations of cells (e.g., neonatal cells or populations of neonatal cells) comprising a nucleic acid construct comprising a coding sequence for a multidomain therapeutic protein (e.g., GAA fusion protein) inserted into a target genomic locus.

[0153] Also provided herein are nucleic acid constructs and compositions (e.g., episomal expression vectors) for expression of a multidomain therapeutic protein (e.g., GAA fusion protein). Also provided herein are nucleic acid constructs and compositions that allow insertion of a multidomain therapeutic protein (e.g., GAA fusion protein) coding sequence into a target genomic locus such as an endogenous ALB locus and/or expression of the multidomain therapeutic protein (e.g., GAA fusion protein) coding sequence. The nucleic acid constructs and compositions can be used in methods of integrating or inserting a multidomain therapeutic protein (e.g., GAA fusion protein) nucleic acid into a target genomic locus in a cell or a population of cells or a subject, methods of expressing a multidomain therapeutic protein (e.g., GAA fusion protein) in a cell or a population of cells or a subject, methods of reducing glycogen accumulation in a cell or a population of cells or a subject, methods of treating Pompe disease or GAA deficiency in a subject, and method of preventing or reducing the onset of a sign or symptom of Pompe disease in a subject, including neonatal cells and subjects.

[0154] Also provided are compositions or combinations or kits comprising a nucleic acid construct comprising a coding sequence for the multidomain therapeutic protein in combination with a nuclease agent or one or more nucleic acids encoding the nuclease agent, wherein the nuclease agent targets a nuclease target site in a target genomic locus. As used herein, the term “in combination with” means that additional component(s) may be administered prior to, concurrent with, or after the administration of the nucleic acid construct. The different components of the combination can be formulated into a single composition, e.g., for simultaneous delivery, or formulated separately into two or more compositions (e.g., a kit including each component, for example, wherein the further agent is in a separate formulation).

[0155] More specifically, described herein in some embodiments is a therapeutic product based on the CRISPR/Cas9 gene editing technology and optionally contained in a lipid nanoparticle (LNP) delivery system, associated with a multidomain therapeutic protein (e.g., GAA fusion protein) DNA gene insertion template optionally contained in a recombinant adeno-associated virus serotype 8 (rAAV8). The CRISPR/Cas9 component has been designed to target and cut the double stranded DNA at a target gene locus (e.g., a safe harbor locus such as an ALB gene locus in hepatocytes), allowing for the multidomain therapeutic protein (e.g., GAA fusion protein) DNA template to be inserted in the genome at the target genomic locus. Transgene insertion provides a functional multidomain therapeutic protein (e.g., GAA fusion protein) gene, encoding the missing or defective genomic GAA in Pompe disease patients.

[0156] Some of the multidomain therapeutic protein (e.g., GAA fusion protein) coding sequences in the constructs disclosed herein are optimized for expression as compared to native GAA coding sequence. For example, the coding sequences in the constructs disclosed herein may include one or more modifications such as codon optimization (e.g., to human codons), depletion of CpG dinucleotides, mutation of cryptic splice sites, or any combination thereof. Other multidomain therapeutic protein coding sequences in the constructs disclosed herein comprise native GAA coding sequences.

[0157] In some embodiments, to minimize mis-splicing in the multidomain therapeutic protein nucleic acid constructs, we applied a two-pronged approach: (1) identifying cryptic splice donors functionally via RNA sequencing (RNA-Seq), rather than prediction based on consensus sequences, and introducing synonymous mutations that disrupt the critical “GU” nucleotide pair that forms the core of the splice donor sequence, and (2) adding additional elements which have the net effect of increasing the time from when the polyA is transcribed to when RNA polymerase reaches the next splice acceptor site. We introduced either concatenated polyA signals (e.g., bovine growth hormone (BGH) and SV40), MAZ elements which cause polymerase pausing, or additional stuffer sequence to increase the time between when RNA polymerase transcribes the polyA to the time when it transcribes the next splice acceptor. The SV40 polyA is bidirectional, but the polyadenylation in the “late” orientation is more efficient than the polyadenylation in the “early” orientation. In some embodiments, to concatenate SV40 “late” polyA with BGH polyA, we mutated the transcription terminator sequences that are present in the “early” inverse orientation of SV40, thus making this version of the SV40 polyA unidirectional rather than bidirectional. Thus, if our DNA insertion templates are inserted into the genome in the non-functional “reverse” orientation, transcription should proceed straight through the entire locus (e.g., albumin locus) and the non-functional insertion should be spliced out along with the first intron, as there are no transcription terminator sequences present in the “reverse” orientation.

II. Multidomain Therapeutic Proteins and Compositions for Inserting Nucleic Acid Constructs Encoding and/or for Expressing Multidomain Therapeutic Proteins in Cells

[0158] Multidomain therapeutic proteins comprising a TfR-binding delivery domain or a CD63-binding delivery domain fused to a lysosomal alpha-glucosidase (GAA) polypeptide and nucleic acid constructs and compositions that allow insertion of a multidomain therapeutic protein coding sequence into a target genomic locus such as an endogenous ALB locus and/or expression of the multidomain therapeutic protein coding sequence are provided. The multidomain therapeutic proteins and nucleic acid constructs and compositions can be administered to cells, populations of cells, or subjects and can be used in methods of integration of a multidomain therapeutic protein nucleic acid into a target genomic locus, methods of expression of a multidomain therapeutic protein in a cell or population of cells or a subject, methods of reducing glycogen accumulation in a cell or a population of cells or a tissue in a subject, methods of treating Pompe disease or GAA deficiency in a subject, and methods of preventing or reducing the onset of a sign or symptom of Pompe disease or GAA deficiency in a subject.

[0159] Provided herein are multidomain therapeutic proteins comprising a TfR-binding delivery domain or a CD63-binding delivery domain fused to a lysosomal alpha-glucosidase (GAA) polypeptide. The multidomain therapeutic proteins and compositions can be used in methods of introducing a multidomain therapeutic protein into a cell or a population of cells or a subject, methods of treating Pompe disease or GAA deficiency in a subject, and methods of preventing or reducing the onset of a sign or symptom of Pompe disease or GAA deficiency in a subject

[0160] Provided herein are nucleic acid constructs and compositions that allow insertion of a multidomain therapeutic protein coding sequence into a target genomic locus such as an endogenous albumin (ALB) locus and/or expression of the multidomain therapeutic protein coding sequence. Also provided herein are nucleic acid constructs and compositions (e.g., episomal expression vectors) for expression of a multidomain therapeutic protein. The nucleic acid constructs and compositions can be used in methods of introducing a nucleic acid construct comprising a multidomain therapeutic protein coding sequence into a cell or a population of cells or a subject, methods of integration of a multidomain therapeutic protein nucleic acid into a target genomic locus, methods of expression of a multidomain therapeutic protein in a cell, methods of treating Pompe disease or GAA deficiency in a subject, and methods of preventing or reducing the onset of a sign or symptom of Pompe disease or GAA deficiency in a subject. Also provided are nuclease agents (e.g., targeting an endogenous ALB locus) or nucleic acids encoding nuclease agents to facilitate integration of the nucleic acid constructs into a target genomic locus such as an endogenous ALB locus.

### A. Multidomain Therapeutic Proteins and Nucleic Acid Constructs Encoding a Multidomain Therapeutic Protein

[0161] The compositions and methods described herein include the use of multidomain therapeutic proteins comprising a lysosomal alpha-glucosidase (GAA) polypeptide (GAA or a biologically active portion thereof, to provide GAA enzyme replacement activity) linked to or fused to a TfR-binding delivery domain or a CD63-binding delivery domain. The compositions and methods described herein also include the use of a nucleic acid construct that comprises a coding sequence for a multidomain therapeutic protein. The compositions and methods described herein can also include the use of a nucleic acid construct that comprises a multidomain therapeutic protein coding sequence or a reverse complement of the multidomain therapeutic protein coding sequence. Such nucleic acid constructs can be for expression of the multidomain therapeutic protein in a cell. Such nucleic acid constructs can be for insertion into a target genomic locus or into a cleavage site created by a nuclease agent or CRISPR/Cas system as disclosed elsewhere herein. The term cleavage site includes a DNA sequence at which a nick or double-strand break is created by a nuclease agent (e.g., a Cas9 protein complexed with a guide RNA). In some embodiments, a double-stranded break is created by a Cas9 protein complexed with a guide RNA, e.g., a Spy Cas9 protein complexed with a Spy Cas9 guide RNA.

[0162] The length of the nucleic acid constructs disclosed herein can vary. The construct can be, for example, from about 1 kb to about 5 kb, such as from about 1 kb to about 4.5 kb or about 1 kb to about 4 kb. An exemplary nucleic acid construct is between about 1 kb to about 5 kb in length or between about 1 kb to about 4 kb in length. Alternatively, a nucleic acid construct can be between about 1 kb to about 1.5 kb, about 1.5 kb to about 2 kb, about 2 kb to about 2.5 kb, about 2.5 kb to about 3 kb, about 3 kb to about 3.5 kb, about 3.5 kb to about 4 kb, about 4 kb to about 4.5 kb, or about 4.5 kb to about 5 kb in length. Alternatively, a nucleic acid construct can be, for example, no more than 5 kb, no more than 4.5 kb, no more than 4 kb, no more than 3.5 kb, no more than 3 kb, or no more than 2.5 kb in length.

[0163] The constructs can comprise deoxyribonucleic acid (DNA) or ribonucleic acid (RNA), can be single-stranded, double-stranded, or partially single-stranded and partially double-stranded, and can be introduced into a host cell in linear or circular (e.g., minicircle) form. See, e.g., US 2010/0047805, US 2011/0281361, and US 2011/0207221, each of which is herein incorporated by reference in their entirety for all purposes. If introduced in linear form, the ends of the construct can be protected (e.g., from exonucleolytic degradation) by known methods. For example, one or more dideoxynucleotide residues can be added to the 3′ terminus of a linear molecule and/or self-complementary oligonucleotides can be ligated to one or both ends. See, e.g., Chang et al. (1987) Proc. Natl. Acad. Sci. U.S.A. 84:4959-4963 and Nehls et al. (1996) Science 272:886-889, each of which is herein incorporated by reference in their entirety for all purposes. Additional methods for protecting exogenous polynucleotides from degradation include, but are not limited to, addition of terminal amino group(s) and the use of modified internucleotide linkages such as, for example, phosphorothioates, phosphoramidates, and O-methyl ribose or deoxyribose residues. A construct can be introduced into a cell as part of a vector molecule having additional sequences such as, for example, replication origins, promoters, and genes encoding antibiotic resistance. A construct may omit viral elements. Moreover, constructs can be introduced as a naked nucleic acid, can be introduced as a nucleic acid complexed with an agent such as a liposome or poloxamer, or can be delivered by viruses (e.g., adenovirus, adeno-associated virus (AAV), herpesvirus, retrovirus, or lentivirus).

[0164] The constructs disclosed herein can be modified on either or both ends to include one or more suitable structural features as needed and/or to confer one or more functional benefit. For example, structural modifications can vary depending on the method(s) used to deliver the constructs disclosed herein to a host cell (e.g., use of viral vector delivery or packaging into lipid nanoparticles for delivery). Such modifications include, for example, terminal structures such as inverted terminal repeats (ITR), hairpin, loops, and other structures such as toroids. For example, the constructs disclosed herein can comprise one, two, or three ITRs or can comprise no more than two ITRs. Various methods of structural modifications are known.

[0165] Some constructs may be inserted so that their expression is driven by the endogenous promoter at the insertion site (e.g., the endogenous ALB promoter when the construct is integrated into the host cell's ALB locus). Such constructs may not comprise a promoter that drives the expression of the multidomain therapeutic protein. For example, the expression of the multidomain therapeutic protein can be driven by a promoter of the host cell (e.g., the endogenous ALB promoter when the transgene is integrated into a host cell's ALB locus). In such cases, the construct may lack control elements (e.g., promoter and/or enhancer) that drive its expression (e.g., a promoterless construct). In other cases, the construct may comprise a promoter and/or enhancer, for example, a constitutive promoter or an inducible or tissue-specific (e.g., liver- or platelet-specific) promoter that drives expression of the multidomain therapeutic protein in an episome or upon integration. For example, the construct may be a construct for expression (e.g., an episomal construct) but not for insertion. In some embodiments, the construct is not for insertion. Non-limiting exemplary constitutive promoters include cytomegalovirus immediate early promoter (CMV), simian virus (SV40) promoter, adenovirus major late (MLP) promoter, Rous sarcoma virus (RSV) promoter, mouse mammary tumor virus (MMTV) promoter, phosphoglycerate kinase (PGK) promoter, elongation factor-alpha (EF1a) promoter, ubiquitin promoters, actin promoters, tubulin promoters, immunoglobulin promoters, a functional fragment thereof, or a combination of any of the foregoing. For example, the promoter may be a CMV promoter or a truncated CMV promoter. In another example, the promoter may be an EF1a promoter. Non-limiting exemplary inducible promoters include those inducible by heat shock, light, chemicals, peptides, metals, steroids, antibiotics, or alcohol. The inducible promoter may be one that has a low basal (non-induced) expression level, such as the Tet-On® promoter (Clontech). Although not required for expression, the constructs may comprise transcriptional or translational regulatory sequences such as promoters, enhancers, insulators, internal ribosome entry sites, additional sequences encoding peptides, and/or polyadenylation signals. The construct may comprise a sequence encoding a multidomain therapeutic protein downstream of and operably linked to a signal sequence encoding a signal peptide. In some examples, the nucleic acid construct works in homology-independent insertion of a nucleic acid that encodes a multidomain therapeutic protein. Such nucleic acid constructs can work, for example, in non-dividing cells (e.g., cells in which non-homologous end joining (NHEJ), not homologous recombination (HR), is the primary mechanism by which double-stranded DNA breaks are repaired) or dividing cells (e.g., actively dividing cells). Such constructs can be, for example, homology-independent donor constructs. In preferred embodiments, promoters and other regulatory sequences are appropriate for use in humans, e.g., recognized by regulatory factors in human cells, e.g., in human liver cells, and acceptable to regulatory authorities for use in humans. Examples of liver-specific promoters include TTR promoters, such as human or mouse TTR promoters. In one example, the construct may comprise a TTR promoter, such as a mouse TTR promoter or a human TTR promoter (e.g., the coding sequence for the multidomain therapeutic protein is operably linked to the TTR promoter). In one example, the construct may comprise a SERPINA1 enhancer, such as a mouse SERPINA1 enhancer or a human SERPINA1 enhancer (e.g., the coding sequence for the multidomain therapeutic protein is operably linked to the SERPINA1 enhancer). In one example, the construct may comprise a TTR promoter and a SERPINA1 enhancer, such as a human SERPINA1 enhancer and a mouse TTR promoter (e.g., the coding sequence for the multidomain therapeutic protein is operably linked to the SERPINA1 enhancer and the TTR promoter).

[0166] The constructs disclosed herein can be modified to include or exclude any suitable structural feature as needed for any particular use and/or that confers one or more desired function. For example, some constructs disclosed herein do not comprise a homology arm. Some constructs disclosed herein are capable of insertion into a target genomic locus or a cut site in a target DNA sequence for a nuclease agent (e.g., capable of insertion into a safe harbor gene, such as an ALB locus) by non-homologous end joining. For example, such constructs can be inserted into a blunt end double-strand break following cleavage with a nuclease agent (e.g., CRISPR/Cas system, e.g., a SpyCas9 CRISPR/Cas system) as disclosed herein. In a specific example, the construct can be delivered via AAV and can be capable of insertion by non-homologous end joining (e.g., the construct does not comprise a homology arm).

[0167] In a particular example, the construct can be inserted via homology-independent targeted integration. For example, the multidomain therapeutic protein coding sequence in the construct can be flanked on each side by a target site for a nuclease agent (e.g., the same target site as in the target DNA sequence for targeted insertion (e.g., in a safe harbor gene), and the same nuclease agent being used to cleave the target DNA sequence for targeted insertion). The nuclease agent can then cleave the target sites flanking the multidomain therapeutic protein. In a specific example, the construct is delivered AAV-mediated delivery, and cleavage of the target sites flanking the multidomain therapeutic protein coding sequence can remove the inverted terminal repeats (ITRs) of the AAV. In some instances, the target DNA sequence for targeted insertion (e.g., target DNA sequence in a safe harbor locus such as a gRNA target sequence including the flanking protospacer adjacent motif) is no longer present if the multidomain therapeutic protein coding sequence is inserted into the cut site or target DNA sequence in the correct orientation but it is reformed if the multidomain therapeutic protein coding sequence is inserted into the cut site or target DNA sequence in the opposite orientation. This can help ensure that the multidomain therapeutic protein coding sequence) is inserted in the correct orientation for expression.

[0168] The constructs disclosed herein can comprise a polyadenylation sequence or polyadenylation tail sequence (e.g., downstream or 3′ of a multidomain therapeutic protein coding sequence). Methods of designing a suitable polyadenylation tail sequence are well-known. The polyadenylation tail sequence can be encoded, for example, as a “poly-A” stretch downstream of the multidomain therapeutic protein coding sequence. A poly-A tail can comprise, for example, at least 20, 30, 40, 50, 60, 70, 80, 90, or 100 adenines, and optionally up to 300 adenines. In a specific example, the poly-A tail comprises 95, 96, 97, 98, 99, or 100 adenine nucleotides. Methods of designing a suitable polyadenylation tail sequence and/or polyadenylation signal sequence are well known. For example, the polyadenylation signal sequence AAUAAA is commonly used in mammalian systems, although variants such as UAUAAA or AU/GUAAA have been identified. See, e.g., Proudfoot (2011) Genes & Dev. 25(17):1770-82, herein incorporated by reference in its entirety for all purposes. The term polyadenylation signal sequence refers to any sequence that directs termination of transcription and addition of a poly-A tail to the mRNA transcript. In eukaryotes, transcription terminators are recognized by protein factors, and termination is followed by polyadenylation, a process of adding a poly(A) tail to the mRNA transcripts in presence of the poly(A) polymerase. The mammalian poly(A) signal typically consists of a core sequence, about 45 nucleotides long, that may be flanked by diverse auxiliary sequences that serve to enhance cleavage and polyadenylation efficiency. The core sequence consists of a highly conserved upstream element (AATAAA or AAUAAA) in the mRNA, referred to as a poly A recognition motif or poly A recognition sequence), recognized by cleavage and polyadenylation-specificity factor (CPSF), and a poorly defined downstream region (rich in Us or Gs and Us), bound by cleavage stimulation factor (CstF). Examples of transcription terminators that can be used include, for example, the human growth hormone (HGH) polyadenylation signal, the simian virus 40 (SV40) late polyadenylation signal, the rabbit beta-globin polyadenylation signal, the bovine growth hormone (BGH) polyadenylation signal, the phosphoglycerate kinase (PGK) polyadenylation signal, an AOX1 transcription termination sequence, a CYC1 transcription termination sequence, or any transcription termination sequence known to be suitable for regulating gene expression in eukaryotic cells. In one example, the polyadenylation signal is a simian virus 40 (SV40) late polyadenylation signal. For example, the polyadenylation signal can comprise, consist essentially of, or consist of SEQ ID NO: 615, 169, or 161. For example, the polyadenylation signal can comprise, consist essentially of, or consist of SEQ ID NO: 169 or 161. For example, the polyadenylation signal can comprise, consist essentially of, or consist of SEQ ID NO: 169. For example, the polyadenylation signal can comprise, consist essentially of, or consist of SEQ ID NO: 615. In another example, the polyadenylation signal is a bovine growth hormone (BGH) polyadenylation signal or a CpG depleted BGH polyadenylation signal. For example, the polyadenylation signal can comprise, consist essentially of, or consist of SEQ ID NO: 162.

[0169] In one example, the polyadenylation signal can comprise a BGH polyadenylation signal. For example, the BGH polyadenylation signal can comprise, consist essentially of, or consist of SEQ ID NO: 751. In another example, the polyadenylation signal can comprise an SV40 polyadenylation signal. For example, the SV40 polyadenylation signal can be a unidirectional SV40 late polyadenylation signal. For example, the transcription terminator sequences that are present in the “early” inverse orientation of SV40 can be mutated (e.g., by mutating the reverse strand AAUAAA sequences to AAUCAA). The SV40 polyA is bidirectional, but the polyadenylation in the “late” orientation is more efficient than the polyadenylation in the “early” orientation. For example, the unidirectional SV40 late polyadenylation signal can comprise, consist essentially of, or consist of SEQ ID NO: 752. In another example, a synthetic polyadenylation signal can be used. For example, the synthetic polyadenylation signal can comprise, consist essentially of, or consist of SEQ ID NO: 753. In another example, two or more polyadenylation signals can be used in combination. For example, the polyadenylation signal can comprise a combination of a BGH polyadenylation signal and an SV40 polyadenylation signal (e.g., an SV40 late polyadenylation signal, such as a unidirectional SV40 late polyadenylation signal). For example, the polyadenylation signal can comprise a combination of a BGH polyadenylation signal and a unidirectional SV40 late polyadenylation signal. For example, the BGH polyadenylation signal can comprise, consist essentially of, or consist of SEQ ID NO: 751, and the unidirectional SV40 late polyadenylation signal can comprise, consist essentially of, or consist of SEQ ID NO: 752. In a specific example, the BGH polyadenylation signal can be upstream (5′) of the SV40 polyadenylation signal (e.g., unidirectional SV40 late polyadenylation signal). For example, the combined polyadenylation signal can comprise the sequence set forth in SEQ ID NO: 795. In another example, the polyadenylation signal can comprise a combination of a BGH polyadenylation signal and a synthetic polyadenylation signal. For example, the BGH polyadenylation signal can comprise, consist essentially of, or consist of SEQ ID NO: 751, and the synthetic polyadenylation signal can comprise, consist essentially of, or consist of SEQ ID NO: 753. In some embodiments, the nucleic acid construct is a unidirectional construct.

[0170] In some embodiments, a stuffer sequence can be used to increase the time between when RNA polymerase transcribes the polyA to the time when it transcribes the next splice acceptor. For example, the stuffer sequence can be used between two different polyadenylation signals (e.g., between a BGH polyadenylation signal and a synthetic polyadenylation signal. For example, the stuffer sequence can comprise, consist essentially of, or consist of SEQ ID NO: 754.

[0171] In some embodiments, MAZ elements that cause polymerase pausing are used in combination with a polyadenylation signal (e.g., a BGH polyadenylation signal or an SV40 polyadenylation signal). For example, one or more (e.g., at least 1, at least 2, at least 3, at least 4, or about 1 to about 4, about 2 to about 4, about 3 to about 4, or 1, 2, 3, or 4) MAZ elements can be used in combination with a polyadenylation signal. For example, the MAZ element can comprise, consist essentially of, or consist of SEQ ID NO: 755.

[0172] In some embodiments, unidirectional SV40 late polyadenylation signals are used. The SV40 polyA is bidirectional, but the polyadenylation in the “late” orientation is more efficient than the polyadenylation in the “early” orientation. The unidirectional SV40 late polyadenylation signals described herein are positioned in the “late” orientation, with the polyadenylation signals present in the “early” orientation mutated or inactivated. In some embodiments, each instance of the sequence AATAAA in the reverse strand is mutated in the unidirectional SV40 late polyadenylation signal. For example, the two conserved AATAAA poly(A) signals present in the SV40 “early” poly(A) to AATCAA. In some embodiments, the unidirectional SV40 late polyadenylation signal is at least 95%, at least 96%, at least 97%, at least 98%, or at least 99% identical to the sequence set forth in SEQ ID NO: 752. In some embodiments, the unidirectional SV40 late polyadenylation signal comprises, consists essentially of, or consists of the sequence set forth in SEQ ID NO: 752.

[0173] The unidirectional SV40 late polyadenylation signals can be used in combination with (e.g., in tandem with) one or more additional polyadenylation signals. Examples of transcription terminators that can be used include, for example, the human growth hormone (HGH) polyadenylation signal, the simian virus 40 (SV40) late polyadenylation signal, the rabbit beta-globin polyadenylation signal, the bovine growth hormone (BGH) polyadenylation signal, the phosphoglycerate kinase (PGK) polyadenylation signal, an AOX1 transcription termination sequence, a CYC1 transcription termination sequence, or any transcription termination sequence known to be suitable for regulating gene expression in eukaryotic cells. For example, the unidirectional SV40 late polyadenylation signals can be used in combination with (e.g., in tandem with) a bovine growth hormone (BGH) polyadenylation signal, optionally wherein the BGH polyadenylation signal is upstream of (5′ of) the unidirectional SV40 late polyadenylation signal. In some embodiments, the BGH polyadenylation signal is at least 95%, at least 96%, at least 97%, at least 98%, or at least 99% identical to the sequence set forth in SEQ ID NO: 751. In some embodiments, the BGH polyadenylation signal comprises, consists essentially of, or consists of the sequence set forth in SEQ ID NO: 751. In some embodiments, the combination of the BGH polyadenylation signal and the unidirectional SV40 late polyadenylation signal is at least 95%, at least 96%, at least 97%, at least 98%, or at least 99% identical to the sequence set forth in SEQ ID NO: 795. In some embodiments, the combination of the BGH polyadenylation signal and the unidirectional SV40 late polyadenylation signal comprises, consists essentially of, or consists of the sequence set forth in SEQ ID NO: 795.

[0174] In some embodiments, a stuffer sequence can be used to increase the time between when RNA polymerase transcribes the polyA to the time when it transcribes the next splice acceptor. For example, the stuffer sequence can be used between two different polyadenylation signals (e.g., between a BGH polyadenylation signal and a synthetic polyadenylation signal. For example, the stuffer sequence can comprise, consist essentially of, or consist of SEQ ID NO: 754.

[0175] In some embodiments, MAZ elements that cause polymerase pausing are used in combination with a polyadenylation signal (e.g., a BGH polyadenylation signal or an SV40 polyadenylation signal). For example, one or more (e.g., at least 1, at least 2, at least 3, at least 4, or about 1 to about 4, about 2 to about 4, about 3 to about 4, or 1, 2, 3, or 4) MAZ elements can be used in combination with a polyadenylation signal. For example, the MAZ element can comprise, consist essentially of, or consist of SEQ ID NO: 755.

[0176] The constructs disclosed herein may also comprise splice acceptor sites (e.g., operably linked to the multidomain therapeutic protein coding sequence, such as upstream or 5′ of the multidomain therapeutic protein coding sequence). The splice acceptor site can, for example, comprise NAG or consist of NAG. In a specific example, the splice acceptor is an ALB splice acceptor (e.g., an ALB splice acceptor used in the splicing together of exons 1 and 2 of ALB (i.e., ALB exon 2 splice acceptor)). For example, such a splice acceptor can be derived from the human ALB gene. In another example, the splice acceptor can be derived from the mouse Alb gene (e.g., an ALB splice acceptor used in the splicing together of exons 1 and 2 of mouse Alb (i.e., mouse Alb exon 2 splice acceptor)). In another example, the splice acceptor is a splice acceptor from a gene encoding the polypeptide of interest (e.g., a GAA splice acceptor). For example, such a splice acceptor can be derived from the human GAA gene. Alternatively, such a splice acceptor can be derived from the mouse GAA gene. Additional suitable splice acceptor sites useful in eukaryotes, including artificial splice acceptors, are well-known. See, e.g., Shapiro et al. (1987) Nucleic Acids Res. 15:7155-7174 and Burset et al. (2001) Nucleic Acids Res. 29:255-259, each of which is herein incorporated by reference in its entirety for all purposes. In a specific example, the splice acceptor is a mouse Alb exon 2 splice acceptor. In a specific example, the splice acceptor can comprise, consist essentially of, or consist of SEQ ID NO: 163.

[0177] In some examples, the nucleic acid constructs disclosed herein can be bidirectional constructs, which are described in more detail below. In some examples, the nucleic acid constructs disclosed herein can be unidirectional constructs, which are described in more detail below. Likewise, in some examples, the nucleic acid constructs disclosed herein can be in a vector (e.g., viral vector, such as AAV, or rAAV8) and/or a lipid nanoparticle as described in more detail elsewhere herein.

### (1) Multidomain Therapeutic Proteins

[0178] A multidomain therapeutic protein as described herein includes a lysosomal alpha-glucosidase polypeptide (GAA or a biologically active portion thereof, to provide GAA enzyme replacement activity) linked to or fused to a TfR-binding delivery domain or a CD63-binding delivery domain. TfR-binding domains, CD63-binding delivery domains, and GAA polypeptides are described in more detail below. Examples of multidomain therapeutic proteins can be found in WO 2013/138400, WO 2017/007796, WO 2017/190079, WO 2017/100467, WO 2018/226861, WO 2019/157224, and WO 2019/222663, each of which is herein incorporated by reference in its entirety for all purposes. For example, the multidomain therapeutic proteins described herein can comprise a TfR-binding delivery domain linked to or fused to a GAA polypeptide. The TfR-binding domain provides binding to the internalization factor TfR. The multidomain therapeutic protein produced by the liver is targeted the muscle and CNS by targeting TfR, which is expressed in muscle and on brain endothelial cells. Transcytosis of TfR in these cells enables blood-brain-barrier crossing. For example, the multidomain therapeutic proteins described herein can comprise a CD63-binding delivery domain linked to or fused to a GAA polypeptide. The CD63-binding domain provides binding to the internalization factor CD63. The multidomain therapeutic protein is targeted to the muscle by targeting CD63, which is a rapidly internalizing protein highly expressed in the muscle. In some multidomain therapeutic proteins, the delivery domain is covalently linked to the GAA. The covalent linkage may be any type of covalent bond (i.e., any bond that involved sharing of electrons). In some cases, the covalent bond is a peptide bond between two amino acids, such that the GAA and the delivery domain in whole or in part form a continuous polypeptide chain, as in a fusion protein. In some cases, the GAA portion and the delivery domain portion are directly linked. In other cases, a linker, such as a peptide linker, is used to tether the two portions. Any suitable linker can be used. See Chen et al., “Fusion protein linkers: property, design and functionality,” 65(10) Adv Drug Deliv Rev. 1357-69 (2013). In some cases, a cleavable linker is used. For example, a cathepsin cleavable linker can be inserted between the delivery domain and the GAA to facilitate removal of the delivery domain in the lysosome. In another example, the linker can comprise an amino acid sequence, e.g., about 10 amino acids in length, for example, 1, 2, 3, 4, 5, 6, 7, 8, 8, or 10 repeats of Gly4Ser (SEQ ID NO: 537). In one example, the linker comprises, consists essentially of, or consists of three such repeats (SEQ ID NO: 616). For example, the coding sequence for the linker can comprise, consist essentially of, or consist of any one of SEQ ID NOS: 618-622 and 747. In another example, the linker comprises, consists essentially of, or consists of two such repeats (SEQ ID NO: 617). For example, the coding sequence for the linker can comprise, consist essentially of, or consist of any one of SEQ ID NOS: 623-629. In another example, the linker comprises, consists essentially of, or consists of one such repeat (SEQ ID NO: 537). For example, the coding sequence for the linker can comprise, consist essentially of, or consist of SEQ ID NO: 630 or 748. In another example, a rigid linker can be used such as a 2λH4 linker. In one example, the linker comprises, consists essentially of, or consists of AEAAAKEAAAKEAAAKEAAAKALEAEAAAKEAAAKEAAAKEAAAKA (SEQ ID NO: 842). For example, the coding sequence for the linker can comprise, consist essentially of, or consist of SEQ ID NO: 841.

[0179] In a particular multidomain therapeutic protein, the GAA (e.g., N-terminus) is covalently linked to the C-terminus of the heavy chain of an anti-TfR or anti-CD63 antibody or to the C-terminus of the light chain (i.e., the multidomain therapeutic protein is in the format of anti-TfR:GAA or anti-CD63:GAA from N-terminus to C-terminus). In another particular multidomain therapeutic protein, the GAA is covalently linked to the N-terminus of the heavy chain of an anti-TfR or anti-CD63 antibody or to the N-terminus of the light chain (i.e., the multidomain therapeutic protein is in the format of GAA:anti-TfR or GAA:anti-CD63 from N-terminus to C-terminus). In another particular embodiment, the GAA (e.g., N-terminus) is linked to the C-terminus of an anti-TfR or anti-CD63 scFv domain (i.e., the multidomain therapeutic protein is in the format of anti-TfR-scFv:GAA or anti-CD63-scFv:GAA, such as anti-TfR-scFv(V_{L}V_{H}):GAA or anti-CD63-scFv(V_{L}V_{H}):GAA, from N-terminus to C-terminus). In another particular embodiment, the GAA (e.g., N-terminus) is linked to the C-terminus of an anti-TfR or anti-CD63 Fab heavy chain (i.e., the multi domain therapeutic protein is in the format of anti-TfR-Fab(LightHeavy):GAA or anti-CD63-Fab(LightHeavy):GAA from N-terminus to C-terminus). In another particular embodiment, the GAA (e.g., N-terminus) is linked to the C-terminus of an anti-TfR or anti-CD63 Fab light chain (i.e., the multi domain therapeutic protein is in the format of anti-TfR-Fab(HeavyLight):GAA or anti-CD63-Fab(HeavyLight):GAA from N-terminus to C-terminus).

### (a) Lysosomal Alpha-Glucosidase (GAA)

[0180] Lysosomal alpha-glucosidase (GAA; also known as acid alpha-glucosidase, acid alpha-glucosidase preproprotein, acid maltase, aglucosidase alfa, alpha-1,4-glucosidase, amyloglucosidase, glucoamylase, LYAG) is encoded by GAA. This enzyme is active in lysosomes, where it breaks down glycogen into glucose.

[0181] The human GAA gene (NCBI GeneID 2548) encodes a 952 amino acid protein. In the lysosome, human GAA is sequentially processed by proteases to polypeptides of 76-, 19.4-, and 3.9-kDa that remain associated. Further cleavage between R(200) and A(204) inefficiently converts the 76-kDa polypeptide to the mature 70-kDa form with an additional 10.4-kDa polypeptide. GAA maturation increases its affinity for glycogen by 7-10 fold. A signal peptide is encoded by amino acids 1-27, a propeptide encoded by amino acids 28-69, lysosomal alpha-glucosidase after removal of the signal peptide and propeptide is encoded by amino acids 70-952, the 76 kDa lysosomal alpha-glucosidase is encoded by amino acids 123-952, and the 70 kDa lysosomal alpha-glucosidase is encoded by amino acids 204-952.

[0182] The GAA expressed from the compositions and methods disclosed herein can be any wild type or variant GAA. In one example, the GAA is a human GAA protein. Human GAA is assigned UniProt reference number P10253. An exemplary amino acid sequence for human GAA is assigned NCBI Accession No. NP_000143.2 and is set forth in SEQ ID NO: 724. An exemplary human GAA mRNA (cDNA) sequence is assigned NCBI Accession No. NM_000152.5 and is set forth in SEQ ID NO: 725. An exemplary human GAA coding sequence is assigned CCDS ID CCDS32760.1 and is set forth in SEQ ID NO: 726. An exemplary mature human GAA amino acid sequence (i.e., the human GAA sequence after removal of the signal peptide and propeptide) starting at amino acid 70 (i.e., GAA 70-952) is set forth in SEQ ID NO: 727. An exemplary coding sequence for GAA 70-952 is set forth in SEQ ID NO: 728.

[0183] In some examples, the GAA (e.g., human GAA) is a wild type GAA (e.g., wild type human GAA) sequence or a fragment thereof. For example, the GAA can be a fragment comprising the mature GAA amino acid sequence (i.e., the GAA sequence after removal of the signal peptide and propeptide), a fragment comprising the 77 kDa form of GAA, or a fragment comprising the 70 kDa form of GAA. In a specific example, the GAA can comprise SEQ ID NO: 727 or can be at least 90%, at least 91%, at least 92%, at least 93%, at least 94%, at least 95%, at least 96%, at least 97%, at least 98%, at least 99%, or at least 99.5% identical to SEQ ID NO: 727. In another specific example, the GAA can consist essentially of SEQ ID NO: 727. In another specific example, the GAA can consist of SEQ ID NO: 727.

[0184] The GAA coding sequences in the constructs disclosed herein may include one or more modifications such as codon optimization (e.g., to human codons), depletion of CpG dinucleotides, mutation of cryptic splice sites, addition of one or more glycosylation sites, or any combination thereof. CpG dinucleotides in a construct can limit the therapeutic utility of the construct. First, unmethylated CpG dinucleotides can interact with host toll-like receptor-9 (TLR-9) to stimulate innate, proinflammatory immune responses. Second, once the CpG dinucleotides become methylated, they can result in the suppression of transgene expression coordinated by methyl-CpG binding proteins. Cryptic splice sites are sequences in a pre-messenger RNA that are not normally used as splice sites, but that can be activated, for example, by mutations that either inactivate canonical splice sites or create splice sites where one did not exist before. Accurate splice site selection is critical for successful gene expression, and removal of cryptic splice sites can favor use of the normal or intended splice site.

[0185] In one example, a GAA coding sequence in a construct disclosed herein has one or more cryptic splice sites mutated or removed. In some embodiments, the nucleotide at position 1095 (or the corresponding position when the GAA coding sequence is aligned with SEQ ID NO: 750) is a “G.” In some embodiments, the nucleotide at position 1098 (or the corresponding position when the GAA coding sequence is aligned with SEQ ID NO: 750) is a “C.” In some embodiments, the nucleotide at position 2343 (or the corresponding position when the GAA coding sequence is aligned with SEQ ID NO: 750) is a “G.” In some embodiments, the nucleotide at position 1095 (or the corresponding position when the GAA coding sequence is aligned with SEQ ID NO: 750) is a “G,” the nucleotide at position 1098 (or the corresponding position when the GAA coding sequence is aligned with SEQ ID NO: 750) is a “C,” and the nucleotide at position 2343 (or the corresponding position when the GAA coding sequence is aligned with SEQ ID NO: 750) is a “G.” In another example, a GAA coding sequence in a construct disclosed herein has all identified cryptic splice sites mutated or removed. In another example, a GAA coding sequence in a construct disclosed herein has one or more CpG dinucleotides removed (i.e., is CpG depleted). In another example, a GAA coding sequence in a construct disclosed herein has all CpG dinucleotides removed (i.e., is fully CpG depleted). In another example, a GAA coding sequence in a construct disclosed herein is codon optimized (e.g., codon optimized for expression in a human or mammal). In a specific example, a GAA coding sequence in a construct disclosed herein has one or more CpG dinucleotides removed (i.e., is CpG depleted) and has one or more cryptic splice sites mutated or removed. In another specific example, a GAA coding sequence in a construct disclosed herein has all CpG dinucleotides removed and has one or more or all identified cryptic splice sites mutated or removed. In another specific example, a GAA coding sequence in a construct disclosed herein has one or more CpG dinucleotides removed (i.e., is CpG depleted) and is codon optimized (e.g., codon optimized for expression in a human or mammal). In another specific example, a GAA coding sequence in a construct disclosed herein has all CpG dinucleotides removed (i.e., is fully CpG depleted) and is codon optimized (e.g., codon optimized for expression in a human or mammal).

[0186] Various codon optimized GAA coding sequences are provided. The GAA coding sequence can be, for example, CpG-depleted (e.g., fully CpG depleted) and/or codon optimized (e.g., CpG depleted (e.g., fully CpG-depleted) and codon optimized). In one example, the GAA coding sequence is (or comprises a sequence) at least 90%, at least 91%, at least 92%, at least 93%, at least 94%, at least 95%, at least 96%, at least 97%, at least 98%, at least 99%, at least 99.5%, or 100% identical to any one of SEQ ID NOS: 750, 749, and 649. In another example, the GAA coding sequence is (or comprises a sequence) at least 95%, at least 96%, at least 97%, at least 98%, at least 99%, at least 99.5%, or 100% identical to any one of SEQ ID NOS: 750, 749, and 649. In another example, the GAA coding sequence is (or comprises a sequence) at least 99%, at least 99.5%, or 100% identical to any one of SEQ ID NOS: 750, 749, and 649. In another example, the GAA coding sequence comprises the sequence set forth in any one of SEQ ID NOS: 750, 749, and 649. In another example, the GAA coding sequence consists essentially of the sequence set forth in any one of SEQ ID NOS: 750, 749, and 649. In another example, the GAA coding sequence consists of the sequence set forth in any one of SEQ ID NOS: 750, 749, and 649. Optionally, the GAA coding sequence encodes a GAA protein (or a GAA protein comprising a sequence) at least 90%, at least 91%, at least 92%, at least 93%, at least 94%, at least 95%, at least 96%, at least 97%, at least 98%, at least 99%, at least 99.5%, or 100% identical to SEQ ID NO: 727 (and, e.g., retaining the activity of native GAA). Optionally, the GAA coding sequence encodes a GAA protein (or a GAA protein comprising a sequence) at least 95%, at least 96%, at least 97%, at least 98%, at least 99%, at least 99.5%, or 100% identical to SEQ ID NO: 727 (and, e.g., retaining the activity of native GAA). Optionally, the GAA coding sequence in the above examples encodes a GAA protein (or a GAA protein comprising a sequence) at least 99%, at least 99.5%, or 100% identical to SEQ ID NO: 727 (and, e.g., retaining the activity of native GAA). Optionally, the GAA coding sequence in the above examples encodes a GAA protein comprising the sequence set forth in SEQ ID NO: 727. Optionally, the GAA coding sequence in the above examples encodes a GAA protein consisting essentially of the sequence set forth in SEQ ID NO: 727. Optionally, the GAA coding sequence in the above examples encodes a GAA protein consisting of the sequence set forth in SEQ ID NO: 727. In some embodiments, the nucleotide at position 1095 (or the corresponding position when the GAA coding sequence is aligned with SEQ ID NO: 750) is a “G.” In some embodiments, the nucleotide at position 1098 (or the corresponding position when the GAA coding sequence is aligned with SEQ ID NO: 750) is a “C.” In some embodiments, the nucleotide at position 2343 (or the corresponding position when the GAA coding sequence is aligned with SEQ ID NO: 750) is a “G.” In some embodiments, the nucleotide at position 1095 (or the corresponding position when the GAA coding sequence is aligned with SEQ ID NO: 750) is a “G,” the nucleotide at position 1098 (or the corresponding position when the GAA coding sequence is aligned with SEQ ID NO: 750) is a “C,” and the nucleotide at position 2343 (or the corresponding position when the GAA coding sequence is aligned with SEQ ID NO: 750) is a “G.”

[0187] In one example, the GAA coding sequence is (or comprises a sequence) at least 90%, at least 91%, at least 92%, at least 93%, at least 94%, at least 95%, at least 96%, at least 97%, at least 98%, at least 99%, at least 99.5%, or 100% identical to SEQ ID NO: 750. In another example, the GAA coding sequence is (or comprises a sequence) at least 90%, at least 91%, at least 92%, at least 93%, at least 94%, at least 95%, at least 96%, at least 97%, at least 98%, at least 99%, at least 99.5%, or 100% identical to SEQ ID NO: 750 and encodes a GAA protein (or a GAA protein comprising a sequence) at least 99%, at least 99.5%, or 100% identical to SEQ ID NO: 727. In another example, the GAA coding sequence is (or comprises a sequence) at least 90%, at least 91%, at least 92%, at least 93%, at least 94%, at least 95%, at least 96%, at least 97%, at least 98%, at least 99%, at least 99.5%, or 100% identical to SEQ ID NO: 750 and encodes a GAA protein comprising the sequence set forth in SEQ ID NO: 727. In another example, the GAA coding sequence is (or comprises a sequence) at least 95%, at least 96%, at least 97%, at least 98%, at least 99%, at least 99.5%, or 100% identical to SEQ ID NO: 750. In another example, the GAA coding sequence is (or comprises a sequence) at least 95%, at least 96%, at least 97%, at least 98%, at least 99%, at least 99.5%, or 100% identical to SEQ ID NO: 750 and encodes a GAA protein (or a GAA protein comprising a sequence) at least 99%, at least 99.5%, or 100% identical to SEQ ID NO: 727. In another example, the GAA coding sequence is (or comprises a sequence) at least 95%, at least 96%, at least 97%, at least 98%, at least 99%, at least 99.5%, or 100% identical to SEQ ID NO: 750 and encodes a GAA protein comprising the sequence set forth in SEQ ID NO: 727. In another example, the GAA coding sequence is (or comprises a sequence) at least 99%, at least 99.5%, or 100% identical to SEQ ID NO: 750. In another example, the GAA coding sequence is (or comprises a sequence) at least 99%, at least 99.5%, or 100% identical to SEQ ID NO: 750 and encodes a GAA protein (or a GAA protein comprising a sequence) at least 99%, at least 99.5%, or 100% identical to SEQ ID NO: 727. In another example, the GAA coding sequence is (or comprises a sequence) at least 99%, at least 99.5%, or 100% identical to SEQ ID NO: 750 and encodes a GAA protein comprising the sequence set forth in SEQ ID NO: 727. In another example, the GAA coding sequence comprises the sequence set forth in SEQ ID NO: 750. In another example, the GAA coding sequence consists essentially of the sequence set forth in SEQ ID NO: 750. In another example, the GAA coding sequence consists of the sequence set forth in SEQ ID NO: 750. The GAA coding sequence can be, for example, CpG-depleted (e.g., fully CpG-depleted) and/or codon optimized. For example, the GAA coding sequence can be CpG depleted (e.g., fully CpG-depleted) and codon optimized. Optionally, the GAA coding sequence encodes a GAA protein (or a GAA protein comprising a sequence) at least 90%, at least 91%, at least 92%, at least 93%, at least 94%, at least 95%, at least 96%, at least 97%, at least 98%, at least 99%, at least 99.5%, or 100% identical to SEQ ID NO: 727 (and, e.g., retaining the activity of native GAA). Optionally, the GAA coding sequence encodes a GAA protein (or a GAA protein comprising a sequence) at least 95%, at least 96%, at least 97%, at least 98%, at least 99%, at least 99.5%, or 100% identical to SEQ ID NO: 727 (and, e.g., retaining the activity of native GAA). Optionally, the GAA coding sequence in the above examples encodes a GAA protein (or a GAA protein comprising a sequence) at least 99%, at least 99.5%, or 100% identical to SEQ ID NO: 727 (and, e.g., retaining the activity of native GAA). Optionally, the GAA coding sequence in the above examples encodes a GAA protein comprising the sequence set forth in SEQ ID NO: 727. Optionally, the GAA coding sequence in the above examples encodes a GAA protein consisting essentially of the sequence set forth in SEQ ID NO: 727. Optionally, the GAA coding sequence in the above examples encodes a GAA protein consisting of the sequence set forth in SEQ ID NO: 727. In some embodiments, the nucleotide at position 1095 (or the corresponding position when the GAA coding sequence is aligned with SEQ ID NO: 750) is a “G.” In some embodiments, the nucleotide at position 1098 (or the corresponding position when the GAA coding sequence is aligned with SEQ ID NO: 750) is a “C.” In some embodiments, the nucleotide at position 2343 (or the corresponding position when the GAA coding sequence is aligned with SEQ ID NO: 750) is a “G.” In some embodiments, the nucleotide at position 1095 (or the corresponding position when the GAA coding sequence is aligned with SEQ ID NO: 750) is a “G,” the nucleotide at position 1098 (or the corresponding position when the GAA coding sequence is aligned with SEQ ID NO: 750) is a “C,” and the nucleotide at position 2343 (or the corresponding position when the GAA coding sequence is aligned with SEQ ID NO: 750) is a “G.”

[0188] In one example, the GAA coding sequence is (or comprises a sequence) at least 90%, at least 91%, at least 92%, at least 93%, at least 94%, at least 95%, at least 96%, at least 97%, at least 98%, at least 99%, at least 99.5%, or 100% identical to SEQ ID NO: 749. In another example, the GAA coding sequence is (or comprises a sequence) at least 90%, at least 91%, at least 92%, at least 93%, at least 94%, at least 95%, at least 96%, at least 97%, at least 98%, at least 99%, at least 99.5%, or 100% identical to SEQ ID NO: 749 and encodes a GAA protein (or a GAA protein comprising a sequence) at least 99%, at least 99.5%, or 100% identical to SEQ ID NO: 727. In another example, the GAA coding sequence is (or comprises a sequence) at least 90%, at least 91%, at least 92%, at least 93%, at least 94%, at least 95%, at least 96%, at least 97%, at least 98%, at least 99%, at least 99.5%, or 100% identical to SEQ ID NO: 749 and encodes a GAA protein comprising the sequence set forth in SEQ ID NO: 727. In another example, the GAA coding sequence is (or comprises a sequence) at least 95%, at least 96%, at least 97%, at least 98%, at least 99%, at least 99.5%, or 100% identical to SEQ ID NO: 749. In another example, the GAA coding sequence is (or comprises a sequence) at least 95%, at least 96%, at least 97%, at least 98%, at least 99%, at least 99.5%, or 100% identical to SEQ ID NO: 749 and encodes a GAA protein (or a GAA protein comprising a sequence) at least 99%, at least 99.5%, or 100% identical to SEQ ID NO: 727. In another example, the GAA coding sequence is (or comprises a sequence) at least 95%, at least 96%, at least 97%, at least 98%, at least 99%, at least 99.5%, or 100% identical to SEQ ID NO: 749 and encodes a GAA protein comprising the sequence set forth in SEQ ID NO: 727. In another example, the GAA coding sequence is (or comprises a sequence) at least 99%, at least 99.5%, or 100% identical to SEQ ID NO: 749. In another example, the GAA coding sequence is (or comprises a sequence) at least 99%, at least 99.5%, or 100% identical to SEQ ID NO: 749 and encodes a GAA protein (or a GAA protein comprising a sequence) at least 99%, at least 99.5%, or 100% identical to SEQ ID NO: 727. In another example, the GAA coding sequence is (or comprises a sequence) at least 99%, at least 99.5%, or 100% identical to SEQ ID NO: 749 and encodes a GAA protein comprising the sequence set forth in SEQ ID NO: 727. In another example, the GAA coding sequence comprises the sequence set forth in SEQ ID NO: 749. In another example, the GAA coding sequence consists essentially of the sequence set forth in SEQ ID NO: 749. In another example, the GAA coding sequence consists of the sequence set forth in SEQ ID NO: 749. The GAA coding sequence can be, for example, CpG-depleted (e.g., fully CpG-depleted) and/or codon optimized. For example, the GAA coding sequence can be CpG depleted (e.g., fully CpG-depleted) and codon optimized. Optionally, the GAA coding sequence encodes a GAA protein (or a GAA protein comprising a sequence) at least 90%, at least 91%, at least 92%, at least 93%, at least 94%, at least 95%, at least 96%, at least 97%, at least 98%, at least 99%, at least 99.5%, or 100% identical to SEQ ID NO: 727 (and, e.g., retaining the activity of native GAA). Optionally, the GAA coding sequence encodes a GAA protein (or a GAA protein comprising a sequence) at least 95%, at least 96%, at least 97%, at least 98%, at least 99%, at least 99.5%, or 100% identical to SEQ ID NO: 727 (and, e.g., retaining the activity of native GAA). Optionally, the GAA coding sequence in the above examples encodes a GAA protein (or a GAA protein comprising a sequence) at least 99%, at least 99.5%, or 100% identical to SEQ ID NO: 727 (and, e.g., retaining the activity of native GAA). Optionally, the GAA coding sequence in the above examples encodes a GAA protein comprising the sequence set forth in SEQ ID NO: 727. Optionally, the GAA coding sequence in the above examples encodes a GAA protein consisting essentially of the sequence set forth in SEQ ID NO: 727. Optionally, the GAA coding sequence in the above examples encodes a GAA protein consisting of the sequence set forth in SEQ ID NO: 727. In some embodiments, the nucleotide at position 1095 (or the corresponding position when the GAA coding sequence is aligned with SEQ ID NO: 750) is a “G.” In some embodiments, the nucleotide at position 1098 (or the corresponding position when the GAA coding sequence is aligned with SEQ ID NO: 750) is a “C.” In some embodiments, the nucleotide at position 2343 (or the corresponding position when the GAA coding sequence is aligned with SEQ ID NO: 750) is a “G.” In some embodiments, the nucleotide at position 1095 (or the corresponding position when the GAA coding sequence is aligned with SEQ ID NO: 750) is a “G,” the nucleotide at position 1098 (or the corresponding position when the GAA coding sequence is aligned with SEQ ID NO: 750) is a “C,” and the nucleotide at position 2343 (or the corresponding position when the GAA coding sequence is aligned with SEQ ID NO: 750) is a “G.”

[0189] In one example, the GAA coding sequence is (or comprises a sequence) at least 90%, at least 91%, at least 92%, at least 93%, at least 94%, at least 95%, at least 96%, at least 97%, at least 98%, at least 99%, at least 99.5%, or 100% identical to SEQ ID NO: 649. In another example, the GAA coding sequence is (or comprises a sequence) at least 90%, at least 91%, at least 92%, at least 93%, at least 94%, at least 95%, at least 96%, at least 97%, at least 98%, at least 99%, at least 99.5%, or 100% identical to SEQ ID NO: 649 and encodes a GAA protein (or a GAA protein comprising a sequence) at least 99%, at least 99.5%, or 100% identical to SEQ ID NO: 727. In another example, the GAA coding sequence is (or comprises a sequence) at least 90%, at least 91%, at least 92%, at least 93%, at least 94%, at least 95%, at least 96%, at least 97%, at least 98%, at least 99%, at least 99.5%, or 100% identical to SEQ ID NO: 649 and encodes a GAA protein comprising the sequence set forth in SEQ ID NO: 727. In another example, the GAA coding sequence is (or comprises a sequence) at least 95%, at least 96%, at least 97%, at least 98%, at least 99%, at least 99.5%, or 100% identical to SEQ ID NO: 649. In another example, the GAA coding sequence is (or comprises a sequence) at least 95%, at least 96%, at least 97%, at least 98%, at least 99%, at least 99.5%, or 100% identical to SEQ ID NO: 649 and encodes a GAA protein (or a GAA protein comprising a sequence) at least 99%, at least 99.5%, or 100% identical to SEQ ID NO: 727. In another example, the GAA coding sequence is (or comprises a sequence) at least 95%, at least 96%, at least 97%, at least 98%, at least 99%, at least 99.5%, or 100% identical to SEQ ID NO: 649 and encodes a GAA protein comprising the sequence set forth in SEQ ID NO: 727. In another example, the GAA coding sequence is (or comprises a sequence) at least 99%, at least 99.5%, or 100% identical to SEQ ID NO: 649. In another example, the GAA coding sequence is (or comprises a sequence) at least 99%, at least 99.5%, or 100% identical to SEQ ID NO: 649 and encodes a GAA protein (or a GAA protein comprising a sequence) at least 99%, at least 99.5%, or 100% identical to SEQ ID NO: 727. In another example, the GAA coding sequence is (or comprises a sequence) at least 99%, at least 99.5%, or 100% identical to SEQ ID NO: 649 and encodes a GAA protein comprising the sequence set forth in SEQ ID NO: 727. In another example, the GAA coding sequence comprises the sequence set forth in SEQ ID NO: 649. In another example, the GAA coding sequence consists essentially of the sequence set forth in SEQ ID NO: 649. In another example, the GAA coding sequence consists of the sequence set forth in SEQ ID NO: 649. The GAA coding sequence can be, for example, CpG-depleted (e.g., fully CpG-depleted) and/or codon optimized. For example, the GAA coding sequence can be CpG depleted (e.g., fully CpG-depleted) and codon optimized. Optionally, the GAA coding sequence encodes a GAA protein (or a GAA protein comprising a sequence) at least 90%, at least 91%, at least 92%, at least 93%, at least 94%, at least 95%, at least 96%, at least 97%, at least 98%, at least 99%, at least 99.5%, or 100% identical to SEQ ID NO: 727 (and, e.g., retaining the activity of native GAA). Optionally, the GAA coding sequence encodes a GAA protein (or a GAA protein comprising a sequence) at least 95%, at least 96%, at least 97%, at least 98%, at least 99%, at least 99.5%, or 100% identical to SEQ ID NO: 727 (and, e.g., retaining the activity of native GAA). Optionally, the GAA coding sequence in the above examples encodes a GAA protein (or a GAA protein comprising a sequence) at least 99%, at least 99.5%, or 100% identical to SEQ ID NO: 727 (and, e.g., retaining the activity of native GAA). Optionally, the GAA coding sequence in the above examples encodes a GAA protein comprising the sequence set forth in SEQ ID NO: 727. Optionally, the GAA coding sequence in the above examples encodes a GAA protein consisting essentially of the sequence set forth in SEQ ID NO: 727. Optionally, the GAA coding sequence in the above examples encodes a GAA protein consisting of the sequence set forth in SEQ ID NO: 727. In some embodiments, the nucleotide at position 1095 (or the corresponding position when the GAA coding sequence is aligned with SEQ ID NO: 750) is a “G.” In some embodiments, the nucleotide at position 1098 (or the corresponding position when the GAA coding sequence is aligned with SEQ ID NO: 750) is a “C.” In some embodiments, the nucleotide at position 2343 (or the corresponding position when the GAA coding sequence is aligned with SEQ ID NO: 750) is a “G.” In some embodiments, the nucleotide at position 1095 (or the corresponding position when the GAA coding sequence is aligned with SEQ ID NO: 750) is a “G,” the nucleotide at position 1098 (or the corresponding position when the GAA coding sequence is aligned with SEQ ID NO: 750) is a “C,” and the nucleotide at position 2343 (or the corresponding position when the GAA coding sequence is aligned with SEQ ID NO: 750) is a “G.”

[0190] Various other codon optimized GAA coding sequences are provided. The GAA coding sequence can be, for example, CpG-depleted (e.g., fully CpG depleted) and/or codon optimized (e.g., CpG depleted (e.g., fully CpG-depleted) and codon optimized).

[0191] When specific GAA or multidomain therapeutic protein nucleic acid constructs sequences are disclosed herein, they are meant to encompass the sequence disclosed or the reverse complement of the sequence. For example, if a GAA or multidomain therapeutic protein nucleic acid construct disclosed herein consists of the hypothetical sequence 5′-CTGGACCGA-3′, it is also meant to encompass the reverse complement of that sequence (5′-TCGGTCCAG-3′). Likewise, when construct elements are disclosed herein in a specific 5′ to 3′ order, they are also meant to encompass the reverse complement of the order of those elements. One reason for this is that, in many embodiments disclosed herein, the GAA or multidomain therapeutic protein nucleic acid constructs are part of a single-stranded recombinant AAV vector. Single-stranded AAV genomes are packaged as either sense (plus-stranded) or anti-sense (minus-stranded genomes), and single-stranded AAV genomes of + and − polarity are packaged with equal frequency into mature rAAV virions. See, e.g., LING et al. (2015) J. Mol. Genet. Med. 9(3):175, Zhou et al. (2008) Mol. Ther. 16(3):494-499, and Samulski et al. (1987) J. Virol. 61:3096-3101, each of which is herein incorporated by reference in its entirety for all purposes.

### (b) CD63-Binding Delivery Domain

[0192] The multidomain therapeutic proteins disclosed herein can comprise a CD63-binding delivery domain fused to a GAA polypeptide. The CD63-binding domain provides binding to the internalization factor CD63 (UniProt Ref. P08962-1). CD63 (also known as CD63 antigen, granulophysin, lysosomal-associated membrane protein 3, LAMP-3, lysosome integral membrane protein 1, Limp1, melanoma-associated antigen ME491, OMA81H, ocular melanoma-associated antigen, tetraspanin-30, or Tspan-30) is a member of the tetraspanin superfamily of cell surface proteins that span the cell membrane four times. It is encoded by the CD63 gene (also known as MLA1 or TSPAN30). CD63 is expressed in virtually all tissues and is thought to be involved in forming and stabilizing signaling complexes. CD63 localizes to the cell membrane, lysosomal membrane, and late endosomal membrane. CD63 is known to associate with integrins and may be involved in epithelial-mesenchymal transitioning.

[0193] In some multidomain therapeutic proteins, the CD63-binding delivery domain is an antibody, an antibody fragment or other antigen-binding protein. In some multidomain therapeutic proteins, the CD63-binding delivery domain is an antigen-binding protein. Examples of antigen-binding proteins include, for example, a receptor-fusion molecule, a trap molecule, a receptor-Fc fusion molecule, an antibody, an Fab fragment, an F(ab′)2 fragment, an Fd fragment, an Fv fragment, a single-chain Fv (scFv) molecule, a dAb fragment, an isolated complementarity determining region (CDR), a CDR3 peptide, a constrained FR3-CDR3-FR4 peptide, a domain-specific antibody, a single domain antibody, a domain-deleted antibody, a chimeric antibody, a CDR-grafted antibody, a diabody, a triabody, a tetrabody, a minibody, a nanobody, a monovalent nanobody, a bivalent nanobody, a small modular immunopharmaceutical (SMIP), a camelid antibody (VHH heavy chain homodimeric antibody), and a shark variable IgNAR domain. Examples of CD63-binding delivery domains can be found in WO 2013/138400, WO 2017/007796, WO 2017/190079, WO 2017/100467, WO 2018/226861, WO 2019/157224, and WO 2019/222663, each of which is herein incorporated by reference in its entirety for all purposes.

[0194] In a particular multidomain therapeutic protein, the CD63-binding delivery domain is an anti-CD63 scFv. In a specific example, the anti-CD63 scFv can comprise SEQ ID NO: 730 or can be at least 90%, at least 91%, at least 92%, at least 93%, at least 94%, at least 95%, at least 96%, at least 97%, at least 98%, at least 99%, or at least 99.5% identical to SEQ ID NO: 730. In another specific example, the anti-CD63 scFv can consist essentially of SEQ ID NO: 730. In another specific example, the anti-CD63 scFv can consist of SEQ ID NO: 730.

[0195] The CD63-binding delivery domain coding sequences in the constructs disclosed herein may include one or more modifications such as codon optimization (e.g., to human codons), depletion of CpG dinucleotides, mutation of cryptic splice sites, addition of one or more glycosylation sites, or any combination thereof. CpG dinucleotides in a construct can limit the therapeutic utility of the construct. First, unmethylated CpG dinucleotides can interact with host toll-like receptor-9 (TLR-9) to stimulate innate, proinflammatory immune responses. Second, once the CpG dinucleotides become methylated, they can result in the suppression of transgene expression coordinated by methyl-CpG binding proteins. Cryptic splice sites are sequences in a pre-messenger RNA that are not normally used as splice sites, but that can be activated, for example, by mutations that either inactivate canonical splice sites or create splice sites where one did not exist before. Accurate splice site selection is critical for successful gene expression, and removal of cryptic splice sites can favor use of the normal or intended splice site.

[0196] In one example, a CD63-binding delivery domain coding sequence in a construct disclosed herein has one or more cryptic splice sites mutated or removed. In another example, a CD63-binding delivery domain coding sequence in a construct disclosed herein has all identified cryptic splice sites mutated or removed. In another example, a CD63-binding delivery domain coding sequence in a construct disclosed herein has one or more CpG dinucleotides removed (i.e., is CpG depleted). In another example, a CD63-binding delivery domain coding sequence in a construct disclosed herein has all CpG dinucleotides removed (i.e., is fully CpG depleted). In another example, a CD63-binding delivery domain coding sequence in a construct disclosed herein is codon optimized (e.g., codon optimized for expression in a human or mammal). In a specific example, a CD63-binding delivery domain coding sequence in a construct disclosed herein has one or more CpG dinucleotides removed (i.e., is CpG depleted) and has one or more cryptic splice sites mutated or removed. In another specific example, a CD63-binding delivery domain coding sequence in a construct disclosed herein has all CpG dinucleotides removed and has one or more or all identified cryptic splice sites mutated or removed. In another specific example, a CD63-binding delivery domain coding sequence in a construct disclosed herein has one or more CpG dinucleotides removed (i.e., is CpG depleted) and is codon optimized (e.g., codon optimized for expression in a human or mammal). In another specific example, a CD63-binding delivery domain coding sequence in a construct disclosed herein has all CpG dinucleotides removed (i.e., is fully CpG depleted) and is codon optimized (e.g., codon optimized for expression in a human or mammal).

[0197] Various anti-CD63 scFv coding sequences are provided. In one example, the anti-CD63 scFv coding sequence is (or comprises a sequence) at least 90%, at least 91%, at least 92%, at least 93%, at least 94%, at least 95%, at least 96%, at least 97%, at least 98%, at least 99%, at least 99.5%, or 100% identical to any one of SEQ ID NOS: 759, 760, and 732. In another example, the anti-CD63 scFv coding sequence is (or comprises a sequence) at least 95%, at least 96%, at least 97%, at least 98%, at least 99%, at least 99.5%, or 100% identical to any one of SEQ ID NOS: 759, 760, and 732. In another example, the anti-CD63 scFv coding sequence is (or comprises a sequence) at least 99%, at least 99.5%, or 100% identical to any one of SEQ ID NOS: 759, 760, and 732. In another example, the anti-CD63 scFv coding sequence comprises the sequence set forth in any one of SEQ ID NOS: 759, 760, and 732. In another example, the anti-CD63 scFv coding sequence consists essentially of the sequence set forth in any one of SEQ ID NOS: 759, 760, and 732. In another example, the anti-CD63 scFv coding sequence consists of the sequence set forth in any one of SEQ ID NOS: 759, 760, and 732. In one example, the anti-CD63 scFv coding sequence is (or comprises a sequence) at least 90%, at least 91%, at least 92%, at least 93%, at least 94%, at least 95%, at least 96%, at least 97%, at least 98%, at least 99%, at least 99.5%, or 100% identical to SEQ ID NO: 759. In another example, the anti-CD63 scFv coding sequence is (or comprises a sequence) at least 95%, at least 96%, at least 97%, at least 98%, at least 99%, at least 99.5%, or 100% identical to SEQ ID NO: 759. In another example, the anti-CD63 scFv coding sequence is (or comprises a sequence) at least 99%, at least 99.5%, or 100% identical to SEQ ID NO: 759. In another example, the anti-CD63 scFv coding sequence comprises the sequence set forth in SEQ ID NO: 759. In another example, the anti-CD63 scFv coding sequence consists essentially of the sequence set forth in SEQ ID NO: 759. In another example, the anti-CD63 scFv coding sequence consists of the sequence set forth in SEQ ID NO: 759. Optionally, the anti-CD63 scFv coding sequence encodes an anti-CD63 scFv protein (or an anti-CD63 scFv protein comprising a sequence) at least 90%, at least 91%, at least 92%, at least 93%, at least 94%, at least 95%, at least 96%, at least 97%, at least 98%, at least 99%, at least 99.5%, or 100% identical to SEQ ID NO: 730 (and, e.g., retaining CD63-binding activity). Optionally, the anti-CD63 scFv coding sequence encodes an anti-CD63 scFv protein (or an anti-CD63 scFv protein comprising a sequence) at least 95%, at least 96%, at least 97%, at least 98%, at least 99%, at least 99.5%, or 100% identical to SEQ ID NO: 730 (and, e.g., retaining CD63-binding activity). Optionally, the anti-CD63 scFv coding sequence in the above examples encodes an anti-CD63 scFv protein (or an anti-CD63 scFv protein comprising a sequence) at least 99%, at least 99.5%, or 100% identical to SEQ ID NO: 730 (and, e.g., retaining CD63-binding activity). Optionally, the anti-CD63 scFv coding sequence in the above examples encodes an anti-CD63 scFv protein comprising the sequence set forth in SEQ ID NO: 730. Optionally, the anti-CD63 scFv coding sequence in the above examples encodes an anti-CD63 scFv protein consisting essentially of the sequence set forth in SEQ ID NO: 730. Optionally, the anti-CD63 scFv coding sequence in the above examples encodes an anti-CD63 scFv protein consisting of the sequence set forth in SEQ ID NO: 730. In some embodiments, the nucleotide at position 3 (or the corresponding position when the anti-CD63 scFv coding sequence is aligned with SEQ ID NO: 759) is an “A.” In some embodiments, the nucleotide at position 132 (or the corresponding position when the anti-CD63 scFv coding sequence is aligned with SEQ ID NO: 759) is an “A.” In some embodiments, the nucleotide at position 273 (or the corresponding position when the anti-CD63 scFv coding sequence is aligned with SEQ ID NO: 759) is a “T.” In some embodiments, the nucleotide at position 3 (or the corresponding position when the anti-CD63 scFv coding sequence is aligned with SEQ ID NO: 759) is an “A,” the nucleotide at position 132 (or the corresponding position when the anti-CD63 scFv coding sequence is aligned with SEQ ID NO: 759) is an “A,” and the nucleotide at position 273 (or the corresponding position when the anti-CD63 scFv coding sequence is aligned with SEQ ID NO: 759) is a “T.”

[0198] In one example, the anti-CD63 scFv coding sequence is (or comprises a sequence) at least 90%, at least 91%, at least 92%, at least 93%, at least 94%, at least 95%, at least 96%, at least 97%, at least 98%, at least 99%, at least 99.5%, or 100% identical to SEQ ID NO: 759. In another example, the anti-CD63 scFv coding sequence is (or comprises a sequence) at least 90%, at least 91%, at least 92%, at least 93%, at least 94%, at least 95%, at least 96%, at least 97%, at least 98%, at least 99%, at least 99.5%, or 100% identical to SEQ ID NO: 759 and encodes an anti-CD63 scFv protein (or an anti-CD63 scFv protein comprising a sequence) at least 99%, at least 99.5%, or 100% identical to SEQ ID NO: 730. In another example, the anti-CD63 scFv coding sequence is (or comprises a sequence) at least 90%, at least 91%, at least 92%, at least 93%, at least 94%, at least 95%, at least 96%, at least 97%, at least 98%, at least 99%, at least 99.5%, or 100% identical to SEQ ID NO: 759 and encodes an anti-CD63 scFv protein comprising the sequence set forth in SEQ ID NO: 730. In another example, the anti-CD63 scFv coding sequence is (or comprises a sequence) at least 95%, at least 96%, at least 97%, at least 98%, at least 99%, at least 99.5%, or 100% identical to SEQ ID NO: 759. In another example, the anti-CD63 scFv coding sequence is (or comprises a sequence) at least 95%, at least 96%, at least 97%, at least 98%, at least 99%, at least 99.5%, or 100% identical to SEQ ID NO: 759 and encodes an anti-CD63 scFv protein (or an anti-CD63 scFv protein comprising a sequence) at least 99%, at least 99.5%, or 100% identical to SEQ ID NO: 730. In another example, the anti-CD63 scFv coding sequence is (or comprises a sequence) at least 95%, at least 96%, at least 97%, at least 98%, at least 99%, at least 99.5%, or 100% identical to SEQ ID NO: 759 and encodes an anti-CD63 scFv protein comprising the sequence set forth in SEQ ID NO: 730. In another example, the anti-CD63 scFv coding sequence is (or comprises a sequence) at least 99%, at least 99.5%, or 100% identical to SEQ ID NO: 759. In another example, the anti-CD63 scFv coding sequence is (or comprises a sequence) at least 99%, at least 99.5%, or 100% identical to SEQ ID NO: 759 and encodes an anti-CD63 scFv protein (or an anti-CD63 scFv protein comprising a sequence) at least 99%, at least 99.5%, or 100% identical to SEQ ID NO: 730. In another example, the anti-CD63 scFv coding sequence is (or comprises a sequence) at least 99%, at least 99.5%, or 100% identical to SEQ ID NO: 759 and encodes an anti-CD63 scFv protein comprising the sequence set forth in SEQ ID NO: 730. In another example, the anti-CD63 scFv coding sequence comprises the sequence set forth in SEQ ID NO: 759. In another example, the anti-CD63 scFv coding sequence consists essentially of the sequence set forth in SEQ ID NO: 759. In another example, the anti-CD63 scFv coding sequence consists of the sequence set forth in SEQ ID NO: 759. The anti-CD63 scFv coding sequence can be, for example, CpG-depleted (e.g., fully CpG-depleted) and/or codon optimized. For example, the anti-CD63 scFv coding sequence can be CpG depleted (e.g., fully CpG-depleted) and codon optimized. Optionally, the anti-CD63 scFv coding sequence encodes an anti-CD63 scFv protein (or an anti-CD63 scFv protein comprising a sequence) at least 90%, at least 91%, at least 92%, at least 93%, at least 94%, at least 95%, at least 96%, at least 97%, at least 98%, at least 99%, at least 99.5%, or 100% identical to SEQ ID NO: 730 (and, e.g., retaining CD63-binding activity). Optionally, the anti-CD63 scFv coding sequence encodes an anti-CD63 scFv protein (or an anti-CD63 scFv protein comprising a sequence) at least 95%, at least 96%, at least 97%, at least 98%, at least 99%, at least 99.5%, or 100% identical to SEQ ID NO: 730 (and, e.g., retaining CD63-binding activity). Optionally, the anti-CD63 scFv coding sequence in the above examples encodes an anti-CD63 scFv protein (or an anti-CD63 scFv protein comprising a sequence) at least 99%, at least 99.5%, or 100% identical to SEQ ID NO: 730 (and, e.g., retaining CD63-binding activity). Optionally, the anti-CD63 scFv coding sequence in the above examples encodes an anti-CD63 scFv protein comprising the sequence set forth in SEQ ID NO: 730. Optionally, the anti-CD63 scFv coding sequence in the above examples encodes an anti-CD63 scFv protein consisting essentially of the sequence set forth in SEQ ID NO: 730. Optionally, the anti-CD63 scFv coding sequence in the above examples encodes an anti-CD63 scFv protein consisting of the sequence set forth in SEQ ID NO: 730. In some embodiments, the nucleotide at position 3 (or the corresponding position when the anti-CD63 scFv coding sequence is aligned with SEQ ID NO: 759) is an “A.” In some embodiments, the nucleotide at position 132 (or the corresponding position when the anti-CD63 scFv coding sequence is aligned with SEQ ID NO: 759) is an “A.” In some embodiments, the nucleotide at position 273 (or the corresponding position when the anti-CD63 scFv coding sequence is aligned with SEQ ID NO: 759) is a “T.” In some embodiments, the nucleotide at position 3 (or the corresponding position when the anti-CD63 scFv coding sequence is aligned with SEQ ID NO: 759) is an “A,” the nucleotide at position 132 (or the corresponding position when the anti-CD63 scFv coding sequence is aligned with SEQ ID NO: 759) is an “A,” and the nucleotide at position 273 (or the corresponding position when the anti-CD63 scFv coding sequence is aligned with SEQ ID NO: 759) is a “T.”

[0199] In one example, the anti-CD63 scFv coding sequence is (or comprises a sequence) at least 90%, at least 91%, at least 92%, at least 93%, at least 94%, at least 95%, at least 96%, at least 97%, at least 98%, at least 99%, at least 99.5%, or 100% identical to SEQ ID NO: 760. In another example, the anti-CD63 scFv coding sequence is (or comprises a sequence) at least 90%, at least 91%, at least 92%, at least 93%, at least 94%, at least 95%, at least 96%, at least 97%, at least 98%, at least 99%, at least 99.5%, or 100% identical to SEQ ID NO: 760 and encodes an anti-CD63 scFv protein (or an anti-CD63 scFv protein comprising a sequence) at least 99%, at least 99.5%, or 100% identical to SEQ ID NO: 730. In another example, the anti-CD63 scFv coding sequence is (or comprises a sequence) at least 90%, at least 91%, at least 92%, at least 93%, at least 94%, at least 95%, at least 96%, at least 97%, at least 98%, at least 99%, at least 99.5%, or 100% identical to SEQ ID NO: 760 and encodes an anti-CD63 scFv protein comprising the sequence set forth in SEQ ID NO: 730. In another example, the anti-CD63 scFv coding sequence is (or comprises a sequence) at least 95%, at least 96%, at least 97%, at least 98%, at least 99%, at least 99.5%, or 100% identical to SEQ ID NO: 760. In another example, the anti-CD63 scFv coding sequence is (or comprises a sequence) at least 95%, at least 96%, at least 97%, at least 98%, at least 99%, at least 99.5%, or 100% identical to SEQ ID NO: 760 and encodes an anti-CD63 scFv protein (or an anti-CD63 scFv protein comprising a sequence) at least 99%, at least 99.5%, or 100% identical to SEQ ID NO: 730. In another example, the anti-CD63 scFv coding sequence is (or comprises a sequence) at least 95%, at least 96%, at least 97%, at least 98%, at least 99%, at least 99.5%, or 100% identical to SEQ ID NO: 760 and encodes an anti-CD63 scFv protein comprising the sequence set forth in SEQ ID NO: 730. In another example, the anti-CD63 scFv coding sequence is (or comprises a sequence) at least 99%, at least 99.5%, or 100% identical to SEQ ID NO: 760. In another example, the anti-CD63 scFv coding sequence is (or comprises a sequence) at least 99%, at least 99.5%, or 100% identical to SEQ ID NO: 760 and encodes an anti-CD63 scFv protein (or an anti-CD63 scFv protein comprising a sequence) at least 99%, at least 99.5%, or 100% identical to SEQ ID NO: 730. In another example, the anti-CD63 scFv coding sequence is (or comprises a sequence) at least 99%, at least 99.5%, or 100% identical to SEQ ID NO: 760 and encodes an anti-CD63 scFv protein comprising the sequence set forth in SEQ ID NO: 730. In another example, the anti-CD63 scFv coding sequence comprises the sequence set forth in SEQ ID NO: 760. In another example, the anti-CD63 scFv coding sequence consists essentially of the sequence set forth in SEQ ID NO: 760. In another example, the anti-CD63 scFv coding sequence consists of the sequence set forth in SEQ ID NO: 760. The anti-CD63 scFv coding sequence can be, for example, CpG-depleted (e.g., fully CpG-depleted) and/or codon optimized. For example, the anti-CD63 scFv coding sequence can be CpG depleted (e.g., fully CpG-depleted) and codon optimized. Optionally, the anti-CD63 scFv coding sequence encodes an anti-CD63 scFv protein (or an anti-CD63 scFv protein comprising a sequence) at least 90%, at least 91%, at least 92%, at least 93%, at least 94%, at least 95%, at least 96%, at least 97%, at least 98%, at least 99%, at least 99.5%, or 100% identical to SEQ ID NO: 730 (and, e.g., retaining CD63-binding activity). Optionally, the anti-CD63 scFv coding sequence encodes an anti-CD63 scFv protein (or an anti-CD63 scFv protein comprising a sequence) at least 95%, at least 96%, at least 97%, at least 98%, at least 99%, at least 99.5%, or 100% identical to SEQ ID NO: 730 (and, e.g., retaining CD63-binding activity). Optionally, the anti-CD63 scFv coding sequence in the above examples encodes an anti-CD63 scFv protein (or an anti-CD63 scFv protein comprising a sequence) at least 99%, at least 99.5%, or 100% identical to SEQ ID NO: 730 (and, e.g., retaining CD63-binding activity). Optionally, the anti-CD63 scFv coding sequence in the above examples encodes an anti-CD63 scFv protein comprising the sequence set forth in SEQ ID NO: 730. Optionally, the anti-CD63 scFv coding sequence in the above examples encodes an anti-CD63 scFv protein consisting essentially of the sequence set forth in SEQ ID NO: 730. Optionally, the anti-CD63 scFv coding sequence in the above examples encodes an anti-CD63 scFv protein consisting of the sequence set forth in SEQ ID NO: 730. In some embodiments, the nucleotide at position 3 (or the corresponding position when the anti-CD63 scFv coding sequence is aligned with SEQ ID NO: 759) is an “A.” In some embodiments, the nucleotide at position 132 (or the corresponding position when the anti-CD63 scFv coding sequence is aligned with SEQ ID NO: 759) is an “A.” In some embodiments, the nucleotide at position 273 (or the corresponding position when the anti-CD63 scFv coding sequence is aligned with SEQ ID NO: 759) is a “T.” In some embodiments, the nucleotide at position 3 (or the corresponding position when the anti-CD63 scFv coding sequence is aligned with SEQ ID NO: 759) is an “A,” the nucleotide at position 132 (or the corresponding position when the anti-CD63 scFv coding sequence is aligned with SEQ ID NO: 759) is an “A,” and the nucleotide at position 273 (or the corresponding position when the anti-CD63 scFv coding sequence is aligned with SEQ ID NO: 759) is a “T.”

[0200] In one example, the anti-CD63 scFv coding sequence is (or comprises a sequence) at least 90%, at least 91%, at least 92%, at least 93%, at least 94%, at least 95%, at least 96%, at least 97%, at least 98%, at least 99%, at least 99.5%, or 100% identical to SEQ ID NO: 732. In another example, the anti-CD63 scFv coding sequence is (or comprises a sequence) at least 90%, at least 91%, at least 92%, at least 93%, at least 94%, at least 95%, at least 96%, at least 97%, at least 98%, at least 99%, at least 99.5%, or 100% identical to SEQ ID NO: 732 and encodes an anti-CD63 scFv protein (or an anti-CD63 scFv protein comprising a sequence) at least 99%, at least 99.5%, or 100% identical to SEQ ID NO: 730. In another example, the anti-CD63 scFv coding sequence is (or comprises a sequence) at least 90%, at least 91%, at least 92%, at least 93%, at least 94%, at least 95%, at least 96%, at least 97%, at least 98%, at least 99%, at least 99.5%, or 100% identical to SEQ ID NO: 732 and encodes an anti-CD63 scFv protein comprising the sequence set forth in SEQ ID NO: 730. In another example, the anti-CD63 scFv coding sequence is (or comprises a sequence) at least 95%, at least 96%, at least 97%, at least 98%, at least 99%, at least 99.5%, or 100% identical to SEQ ID NO: 732. In another example, the anti-CD63 scFv coding sequence is (or comprises a sequence) at least 95%, at least 96%, at least 97%, at least 98%, at least 99%, at least 99.5%, or 100% identical to SEQ ID NO: 732 and encodes an anti-CD63 scFv protein (or an anti-CD63 scFv protein comprising a sequence) at least 99%, at least 99.5%, or 100% identical to SEQ ID NO: 730. In another example, the anti-CD63 scFv coding sequence is (or comprises a sequence) at least 95%, at least 96%, at least 97%, at least 98%, at least 99%, at least 99.5%, or 100% identical to SEQ ID NO: 732 and encodes an anti-CD63 scFv protein comprising the sequence set forth in SEQ ID NO: 730. In another example, the anti-CD63 scFv coding sequence is (or comprises a sequence) at least 99%, at least 99.5%, or 100% identical to SEQ ID NO: 732. In another example, the anti-CD63 scFv coding sequence is (or comprises a sequence) at least 99%, at least 99.5%, or 100% identical to SEQ ID NO: 732 and encodes an anti-CD63 scFv protein (or an anti-CD63 scFv protein comprising a sequence) at least 99%, at least 99.5%, or 100% identical to SEQ ID NO: 730. In another example, the anti-CD63 scFv coding sequence is (or comprises a sequence) at least 99%, at least 99.5%, or 100% identical to SEQ ID NO: 732 and encodes an anti-CD63 scFv protein comprising the sequence set forth in SEQ ID NO: 730. In another example, the anti-CD63 scFv coding sequence comprises the sequence set forth in SEQ ID NO: 732. In another example, the anti-CD63 scFv coding sequence consists essentially of the sequence set forth in SEQ ID NO: 732. In another example, the anti-CD63 scFv coding sequence consists of the sequence set forth in SEQ ID NO: 732. The anti-CD63 scFv coding sequence can be, for example, CpG-depleted (e.g., fully CpG-depleted) and/or codon optimized. For example, the anti-CD63 scFv coding sequence can be CpG depleted (e.g., fully CpG-depleted) and codon optimized. Optionally, the anti-CD63 scFv coding sequence encodes an anti-CD63 scFv protein (or an anti-CD63 scFv protein comprising a sequence) at least 90%, at least 91%, at least 92%, at least 93%, at least 94%, at least 95%, at least 96%, at least 97%, at least 98%, at least 99%, at least 99.5%, or 100% identical to SEQ ID NO: 730 (and, e.g., retaining CD63-binding activity). Optionally, the anti-CD63 scFv coding sequence encodes an anti-CD63 scFv protein (or an anti-CD63 scFv protein comprising a sequence) at least 95%, at least 96%, at least 97%, at least 98%, at least 99%, at least 99.5%, or 100% identical to SEQ ID NO: 730 (and, e.g., retaining CD63-binding activity). Optionally, the anti-CD63 scFv coding sequence in the above examples encodes an anti-CD63 scFv protein (or an anti-CD63 scFv protein comprising a sequence) at least 99%, at least 99.5%, or 100% identical to SEQ ID NO: 730 (and, e.g., retaining CD63-binding activity). Optionally, the anti-CD63 scFv coding sequence in the above examples encodes an anti-CD63 scFv protein comprising the sequence set forth in SEQ ID NO: 730. Optionally, the anti-CD63 scFv coding sequence in the above examples encodes an anti-CD63 scFv protein consisting essentially of the sequence set forth in SEQ ID NO: 730. Optionally, the anti-CD63 scFv coding sequence in the above examples encodes an anti-CD63 scFv protein consisting of the sequence set forth in SEQ ID NO: 730. In some embodiments, the nucleotide at position 3 (or the corresponding position when the anti-CD63 scFv coding sequence is aligned with SEQ ID NO: 759) is an “A.” In some embodiments, the nucleotide at position 132 (or the corresponding position when the anti-CD63 scFv coding sequence is aligned with SEQ ID NO: 759) is an “A.” In some embodiments, the nucleotide at position 273 (or the corresponding position when the anti-CD63 scFv coding sequence is aligned with SEQ ID NO: 759) is a “T.” In some embodiments, the nucleotide at position 3 (or the corresponding position when the anti-CD63 scFv coding sequence is aligned with SEQ ID NO: 759) is an “A,” the nucleotide at position 132 (or the corresponding position when the anti-CD63 scFv coding sequence is aligned with SEQ ID NO: 759) is an “A,” and the nucleotide at position 273 (or the corresponding position when the anti-CD63 scFv coding sequence is aligned with SEQ ID NO: 759) is a “T.”

[0201] When specific anti-CD63 scFv or multidomain therapeutic protein nucleic acid constructs sequences are disclosed herein, they are meant to encompass the sequence disclosed or the reverse complement of the sequence. For example, if an anti-CD63 scFv or multidomain therapeutic protein nucleic acid construct disclosed herein consists of the hypothetical sequence 5′-CTGGACCGA-3′, it is also meant to encompass the reverse complement of that sequence (5′-TCGGTCCAG-3′). Likewise, when construct elements are disclosed herein in a specific 5′ to 3′ order, they are also meant to encompass the reverse complement of the order of those elements. One reason for this is that, in many embodiments disclosed herein, the anti-CD63 scFv or multidomain therapeutic protein nucleic acid constructs are part of a single-stranded recombinant AAV vector. Single-stranded AAV genomes are packaged as either sense (plus-stranded) or anti-sense (minus-stranded genomes), and single-stranded AAV genomes of + and -polarity are packaged with equal frequency into mature rAAV virions. See, e.g., LING et al. (2015) J. Mol. Genet. Med. 9(3):175, Zhou et al. (2008) Mol. Ther. 16(3):494-499, and Samulski et al. (1987) J. Virol. 61:3096-3101, each of which is herein incorporated by reference in its entirety for all purposes.

### (c) TfR-Binding Delivery Domain

[0202] The multidomain therapeutic proteins disclosed herein can comprise a TfR-binding delivery domain fused to a GAA polypeptide. The TfR-binding domain provides binding to the internalization factor transferrin receptor protein 1(TfR; UniProt Ref. P02786). TfR (also known as TR, TfR1, and Trfr) is encoded by the TFRC gene. TfR is expressed in muscle and on brain endothelial cells. Transcytosis of TfR in these cells enables blood-brain-barrier crossing. In some embodiments, the multidomain therapeutic proteins comprising a TfR-binding delivery domain (e.g., scFv) fused to a GAA polypeptide do not alter transferrin uptake. In some embodiments, the multidomain therapeutic proteins comprising a TfR-binding delivery domain (e.g., scFv) fused to a GAA polypeptide do not alter iron homeostasis. In some embodiments, the multidomain therapeutic proteins comprising a TfR-binding delivery domain (e.g., scFv) fused to a GAA polypeptide do not alter transferrin uptake or iron homeostasis.

[0203] Transferrin receptor 1 (TfR) is a membrane receptor involved in the control of iron supply to the cell through the binding of transferrin, the major iron-carrier protein. Transferrin receptor 1 is expressed from the TFRC gene. Transferrin receptor 1 may be referred to, herein, at TFRC. This receptor plays a key role in the control of cell proliferation because iron is essential for sustaining ribonucleotide reductase activity, and is the only enzyme that catalyzes the conversion of ribonucleotides to deoxyribonucleotides. Preferably, the TfR is human TfR (hTfR). See e.g., Accession numbers NP_001121620.1; BAD92491.1; and NP_001300894.1; and e!Ensembl entry: ENSG00000072274. The human transferrin receptor 1 is expressed in several tissues, including but not limited to: cerebral cortex; cerebellum; hippocampus; caudate; parathyroid gland; adrenal gland; bronchus; lung; oral mucosa; esophagus; stomach; duodenum; small intestine; colon; rectum; liver; gallbladder; pancreas; kidney; urinary bladder; testis; epididymis; prostate; vagina; ovary; fallopian tube; endometrium; cervix; placenta; breast; heart muscle; smooth muscle; soft tissue; skin; appendix; lymph node; tonsil; and bone marrow. A related transferrin receptor is transferrin receptor 2 (TfR2). Human transferrin receptor 2 bears about 45% sequence identity to human transferrin receptor 1. Trinder & Baker, Transferrin receptor 2: a new molecule in iron metabolism. Int J Biochem Cell Biol. 2003 March; 35(3):292-6. Unless otherwise stated, transferrin receptor as used herein generally refers to transferrin receptor 1 (e.g., human transferrin receptor 1).

[0204] Human Transferrin (Tf) is a single chain, 80 kDa member of the anion-binding superfamily of proteins. Transferrin is a 698 amino acid precursor that is divided into a 19 aa signal sequence plus a 679 aa mature segment that typically contains 19 intrachain disulfide bonds. The N- and C-terminal flanking regions (or domains) bind ferric iron through the interaction of an obligate anion (e.g., bicarbonate) and four amino acids (His, Asp, and two Tyr). Apotransferrin (or iron-free) will initially bind one atom of iron at the C-terminus, and this is followed by subsequent iron binding by the N-terminus to form holotransferrin (diferric Tf, Holo-Tf). Through its C-terminal iron-binding domain, holotransferrin will interact with the TfR on the surface of cells where it is internalized into acidified endosomes. Iron dissociates from the Tf molecule within these endosomes, and is transported into the cytosol as ferrous iron. In addition to TfR, transferrin is reported to bind to cubulin, IGFBP3, microbial iron-binding proteins and liver-specific TfR2.

[0205] The blood-brain barrier (BBB) is located within the microvasculature of the brain, and it regulates passage of molecules from the blood to the brain. Burkhart et al., Accessing targeted nanoparticles to the brain: the vascular route. Curr Med Chem. 2014; 21(36):4092-9. The transcellular passage through the brain capillary endothelial cells can take place via 1) cell entry by leukocytes; 2) carrier-mediated influx of e.g., glucose by glucose transporter 1 (GLUT-1), amino acids by e.g., the L-type amino acid transporter 1 (LAT-1) and small peptides by e.g., organic anion-transporting peptide-B (OATP-B); 3) paracellular passage of small hydrophobic molecules; 4) adsorption-mediated transcytosis of e.g., albumin and cationized molecules; 5) passive diffusion of lipid soluble, non-polar solutes, including CO₂ and O₂; and 5) receptor-mediated transcytosis of, e.g., insulin by the insulin receptor and Tf by the TfR. Johnsen et al., Targeting the transferrin receptor for brain drug delivery, Prog Neurobiol. 2019 October; 181:101665.

[0206] For example, anti-TfR:GAA fusion proteins exhibiting high affinity to the transferrin receptor and superior blood-brain barrier crossing are provided. Surprisingly, fusions exhibiting high binding affinity to TfR crossed the blood-brain barrier more efficiently than that of low affinity binders. We found that high affinity antibodies impart the best delivery to the CNS and muscle in the anti-hTFRscfv:GAA format. This is in contrast to previous findings with mono- and bivalent anti-TFR antibodies, where low affinity antibodies crossed the BBB more effectively. The fusions provided herein have an ability to efficiently deliver GAA to the brain and, thus, are an effective treatment of diseases such as GAA deficiency (e.g., Pompe disease).

[0207] Provided herein are antigen-binding proteins, such as antibodies, antigen-binding fragments thereof, such as Fabs and scFvs, that bind specifically to the transferrin receptor, preferably the human transferrin receptor 1 (anti-hTfR). For example, in an embodiment, the anti-hTfR is in the form of a fusion protein. The fusion protein includes the anti-hTfR antigen-binding protein fused to a GAA polypeptide. The anti-hTfRs efficiently cross the blood-brain barrier (BBB) and can, thereby, deliver the fused GAA to the brain.

[0208] An antigen-binding protein that specifically binds to transferrin receptor and fusions thereof, for example, a tag such as His6 and/or myc (e.g., human transferrin receptor (e.g., REGN2431) or monkey transferrin receptor (e.g., REGN2054)) binds at about 25° C., e.g., in a surface plasmon resonance assay, with a K_{D} of about 20 nM or a higher affinity. Such an antigen-binding protein may be referred to as “anti-TfR.” In some embodiments, the antigen-binding protein binds to human transferrin receptor with a K_{D} of about 0.41 nM or a stronger affinity. In some embodiments, the antigen-binding protein binds to human transferrin receptor with a K_{D} of about 3 nM or a stronger affinity. In some embodiments, the antigen-binding protein binds to human transferrin receptor with a K_{D} of about 0.45 nM to 3 nM. In some embodiments, a Fab having an HCVR and LCVR binds to human transferrin receptor with a K_{D} of about 0.65 nM or a stronger affinity. In some embodiments, a fusion protein disclosed herein binds to human transferrin receptor with a K_{D} of about 1×10⁻⁷ M or a stronger affinity.

[0209] In an embodiment, an anti-hTfR scFv:GAA fusion protein includes an scFv comprising the arrangement of variable regions as follows: LCVR-HCVR or HCVR-LCVR, wherein the HCVR and LCVR are optionally connected by a linker and the scFv is connected, optionally by a linker, to a GAA polypeptide (e.g., LCVR-(Gly₄Ser)₃(SEQ ID NO: 616)-HCVR-(Gly₄Ser)₂(SEQ ID NO: 617))-GAA; or LCVR-(Gly₄Ser)₃(SEQ ID NO: 616)-HCVR-(Gly₄Ser)₂(SEQ ID NO: 617))-GAA) (Gly₄Ser=SEQ ID NO: 537)). In one example, an scFv comprises an arrangement of variable regions as follows: LCVR-HCVR. In another example, an scFv comprises an arrangement of variable regions as follows: HCVR-LCVR. In one example, the linker between the HCVR and LCVR comprises, consists essentially of, or consists of three such repeats (SEQ ID NO: 616). For example, the coding sequence for the linker can comprise, consist essentially of, or consist of any one of SEQ ID NOS: 618-622 and 747. In another example, the linker between the HCVR and LCVR comprises, consists essentially of, or consists of two such repeats (SEQ ID NO: 617). For example, the coding sequence for the linker can comprise, consist essentially of, or consist of any one of SEQ ID NOS: 623-629. In another example, the linker between the HCVR and LCVR comprises, consists essentially of, or consists of one such repeat (SEQ ID NO: 537). For example, the coding sequence for the linker can comprise, consist essentially of, or consist of SEQ ID NO: 630 or 748. In one example, the linker between the scFv and GAA comprises, consists essentially of, or consists of three such repeats (SEQ ID NO: 616). For example, the coding sequence for the linker can comprise, consist essentially of, or consist of any one of SEQ ID NOS: 618-622 and 747. In another example, the linker between the scFv and GAA comprises, consists essentially of, or consists of two such repeats (SEQ ID NO: 617). For example, the coding sequence for the linker can comprise, consist essentially of, or consist of any one of SEQ ID NOS: 623-629. In another example, the linker between the scFv and GAA comprises, consists essentially of, or consists of one such repeat (SEQ ID NO: 537). For example, the coding sequence for the linker can comprise, consist essentially of, or consist of SEQ ID NO: 630 or 748. In another example, a rigid linker can be used such as a 2×H4 linker. In one example, the linker comprises, consists essentially of, or consists of AEAAAKEAAAKEAAAKEAAAKALEAEAAAKEAAAKEAAAKEAAAKA (SEQ ID NO: 842). For example, the coding sequence for the linker can comprise, consist essentially of, or consist of SEQ ID NO: 841.

[0210] An anti-hTfR:GAA optionally comprises a signal peptide, connected to the antigen-binding protein that binds specifically to transferrin receptor (TfR), preferably, human transferrin receptor (hTfR) which is fused (optionally by a linker) to GAA. In an embodiment, the signal peptide is the mROR signal sequence (e.g., mROR signal sequence-LCVR-(Gly₄Ser)₃(SEQ ID NO: 616)-HCVR-(Gly₄Ser)₂(SEQ ID NO: 617))-GAA; or LCVR-(Gly₄Ser)₃(SEQ ID NO: 616)-HCVR-(Gly₄Ser)₂(SEQ ID NO: 617))-GAA) (Gly₄Ser=SEQ ID NO: 537)). The term “fused” or “tethered” with regard to fused polypeptides refers to polypeptides joined directly or indirectly (e.g., via a linker or other polypeptide).

[0211] In an embodiment, the assignment of amino acids to each framework or CDR domain in an immunoglobulin is in accordance with the definitions of Sequences of Proteins of Immunological Interest, Kabat et al.; National Institutes of Health, Bethesda, Md.; 5^{th} ed.; NIH Publ. No. 91-3242 (1991); Kabat (1978) Adv. Prot. Chem. 32:1-75; Kabat et al., (1977) J. Biol. Chem. 252:6609-6616; Chothia, et al., (1987) J Mol. Biol. 196:901-917 or Chothia, et al., (1989) Nature 342: 878-883. Thus, included are antibodies and antigen-binding fragments including the CDRs of a V_{H} and the CDRs of a V_{L}, which V_{H} and V_{L} comprise amino acid sequences as set forth herein (see, e.g., sequences of Table 2, or variants thereof), wherein the CDRs are as defined according to Kabat and/or Chothia.

[0212] In some multidomain therapeutic proteins, the TfR-binding delivery domain is an antibody, an antibody fragment or other antigen-binding protein. In some multidomain therapeutic proteins, the TfR-binding delivery domain is an antigen-binding protein. Examples of antigen-binding proteins include, for example, a receptor-fusion molecule, a trap molecule, a receptor-Fc fusion molecule, an antibody, an Fab fragment, an F(ab′)₂ fragment, an Fd fragment, an Fv fragment, a single-chain Fv (scFv) molecule, a dAb fragment, an isolated complementarity determining region (CDR), a CDR3 peptide, a constrained FR3-CDR3-FR4 peptide, a domain-specific antibody, a single domain antibody, a domain-deleted antibody, a chimeric antibody, a CDR-grafted antibody, a diabody, a triabody, a tetrabody, a minibody, a nanobody, a monovalent nanobody, a bivalent nanobody, a small modular immunopharmaceutical (SMIP), a camelid antibody (VHH heavy chain homodimeric antibody), and a shark variable IgNAR domain.

[0213] Provided herein are antibodies that bind specifically to the human transferrin receptor 1. The term “antibody,” as used herein, refers to immunoglobulin molecules comprising four polypeptide chains, two heavy chains (HCs) and two light chains (LCs), inter-connected by disulfide bonds. In an embodiment, each antibody heavy chain (HC) comprises a heavy chain variable region (“HCVR” or “V_{H}”) (e.g., comprising SEQ ID NO: 171, 680, 181, 681, 191, 682, 201, 211, 221, 685, 231, 687, 241, 689, 251, 261, 691, 271, 281, 692, 291, 301, 311, 694, 321, 331, 696, 341, 351, 697, 361, 699, 371, 700, 381, 391, 401, 411, 421, 701, 431, 441, 451, 461, 471, 702, and/or 481 or a variant thereof) and a heavy chain constant region (e.g., human IgG, human IgG1 or human IgG4); and each antibody light chain (LC) comprises a light chain variable region (“LCVR or “V_{L}”) (e.g., SEQ ID NO: 176, 186, 196, 206, 683, 216, 684, 226, 686, 236, 688, 246, 690, 256, 266, 276, 286, 693, 296, 306, 316, 695, 326, 336, 346, 356, 698, 366, 376, 386, 396, 406, 416, 426, 436, 446, 456, 466, 476, 632, 486, and/or 703 or a variant thereof) and a light chain constant region (e.g., human kappa or human lambda). In an embodiment, each antibody heavy chain (HC) comprises a heavy chain variable region (“HCVR” or “V_{H}”) (e.g., comprising SEQ ID NO: 391 or 411, or a variant thereof) and a heavy chain constant region (e.g., human IgG, human IgG1 or human IgG4); and each antibody light chain (LC) comprises a light chain variable region (“LCVR or “V_{L}”) (e.g., SEQ ID NO: 396 or 416, or a variant thereof) and a light chain constant region (e.g., human kappa or human lambda). In an embodiment, each antibody heavy chain (HC) comprises a heavy chain variable region (“HCVR” or “V_{H}”) (e.g., comprising SEQ ID NO: 391, or a variant thereof) and a heavy chain constant region (e.g., human IgG, human IgG1 or human IgG4); and each antibody light chain (LC) comprises a light chain variable region (“LCVR or “V_{L}”) (e.g., SEQ ID NO: 396, or a variant thereof) and a light chain constant region (e.g., human kappa or human lambda). In an embodiment, each antibody heavy chain (HC) comprises a heavy chain variable region (“HCVR” or “V_{H}”) (e.g., comprising SEQ ID NO: 411, or a variant thereof) and a heavy chain constant region (e.g., human IgG, human IgG1 or human IgG4); and each antibody light chain (LC) comprises a light chain variable region (“LCVR or “V_{L}”) (e.g., SEQ ID NO: 416, or a variant thereof) and a light chain constant region (e.g., human kappa or human lambda). The V_{H} and V_{L} regions can be further subdivided into regions of hypervariability, termed complementarity determining regions (CDR), interspersed with regions that are more conserved, termed framework regions (FR). Each V_{H} and V_{L} comprises three CDRs and four FRs. Anti-TfR antibodies disclosed herein can also be fused to GAA.

[0214] An anti-TfR antigen-binding protein provided herein may be an antigen-binding fragment of an antibody which may be tethered to GAA. The terms “antigen-binding portion” or “antigen-binding fragment” of an antibody, as used herein, refers to an immunoglobulin molecule that binds antigen but that does not include all of the sequences of a full antibody (preferably, the full antibody is an IgG). Non-limiting examples of antigen-binding fragments include: (i) Fab fragments; (ii) F(ab′)₂ fragments; (iii) Fd fragments; (iv) Fv fragments; (v) single-chain Fv (scFv) molecules; and (vi) dAb fragments; consisting of the amino acid residues that mimic the hypervariable region of an antibody (e.g., an isolated complementarity determining region (CDR) such as a CDR3 peptide), or a constrained FR3-CDR3-FR4 peptide. Other engineered molecules, such as domain-specific antibodies, single domain antibodies, domain-deleted antibodies, chimeric antibodies, CDR-grafted antibodies, diabodies, triabodies, tetrabodies, minibodies and small modular immunopharmaceuticals (SMIPs), are also encompassed within the expression “antigen-binding fragment,” as used herein.

[0215] An anti-TfR antigen-binding protein may be an scFv which may be tethered to a GAA polypeptide. An scFv (single chain fragment variable) has variable regions of heavy (V_{H}) and light (V_{L}) domains (in either order), which, preferably, are joined together by a flexible linker (e.g., peptide linker). The length of the flexible linker used to link both of the V regions may be important for yielding the correct folding of the polypeptide chain. Previously, it has been estimated that the peptide linker must span 3.5 nm (35 Å) between the carboxy terminus of the variable domain and the amino terminus of the other domain without affecting the ability of the domains to fold and form an intact antigen-binding site (Huston et al., Protein engineering of single-chain Fv analogs and fusion proteins. Methods in Enzymology. 1991; 203:46-88). In an embodiment, the linker comprises an amino acid sequence of such length to separate the variable domains by about 3.5 nm.

[0216] In some embodiments, an anti-TfR antigen-binding protein described herein comprises a monovalent or “one-armed” antibody. The monovalent or “one-armed” antibodies as used herein refer to immunoglobulin proteins comprising a single variable domain. For example, the one-armed antibody may comprise a single variable domain within a Fab wherein the Fab is linked to at least one Fc fragment. In certain embodiments, the one-armed antibody comprises: (i) a heavy chain comprising a heavy chain constant region and a heavy chain variable region, (ii) a light chain comprising a light chain constant region and a light chain variable region, and (iii) a polypeptide comprising a Fc fragment or a truncated heavy chain. In certain embodiments, the Fc fragment or a truncated heavy chain comprised in the separate polypeptide is a “dummy Fe,” which refers to an Fc fragment that is not linked to an antigen binding domain. The one-armed antibodies of the present disclosure may comprise any of the HCVR/LCVR pairs or CDR amino acid sequences as set forth in Table 2 herein. One-armed antibodies comprising a full-length heavy chain, a full-length light chain and an additional Fc domain polypeptide can be constructed using standard methodologies (see, e.g., WO2010151792, which is incorporated herein by reference in its entirety), wherein the heavy chain constant region differs from the Fc domain polypeptide by at least two amino acids (e.g., H95R and Y96F according to the IMGT exon numbering system; or H435R and Y436F according to the EU numbering system). Such modifications are useful in purification of the monovalent antibodies (see WO2010151792).

[0217] An antigen-binding fragment of an antibody will, in an embodiment, comprise at least one variable domain. The variable domain may be of any size or amino acid composition and will generally comprise at least one CDR, which is adjacent to or in frame with one or more framework sequences. In antigen-binding fragments having a V_{H} domain associated with a V_{L} domain, the V_{H} and V_{L} domains may be situated relative to one another in any suitable arrangement. For example, the variable region may be dimeric and contain V_{H}-V_{H}, V_{H}-V_{L} or V_{L}-V_{L} dimers. Alternatively, the antigen-binding fragment of an antibody may contain a monomeric V_{H} or V_{L} domain.

[0218] In certain embodiments, an antigen-binding fragment of an antibody may contain at least one variable domain covalently linked to at least one constant domain. Non-limiting, exemplary configurations of variable and constant domains that may be found within an antigen-binding fragment of an antibody described herein include: (i) V_{H}-CH1; (ii) V_{H}-CH2; (iii) V_{H}-CH3; (iv) V_{H}-CH1-CH2; (v) V_{H}-CH1-CH2-CH3; (vi) V_{H}-CH2-CH3; (vii) V_{H}-CL; (viii) V_{L}-CH1; (ix) V_{L}-CH2; (x) V_{L}-CH3; (xi) V_{L}-CH1-CH2; (xii) V_{L}-CH1-CH2-CH3; (xiii) V_{L}-CH2-CH3; and (xiv) V_{L}-CL. In any configuration of variable and constant domains, including any of the exemplary configurations listed above, the variable and constant domains may be either directly linked to one another or may be linked by a full or partial hinge or linker region. A hinge region may consist of at least 2 (e.g., 5, 10, 15, 20, 40, 60 or more) amino acids, which result in a flexible or semi-flexible linkage between adjacent variable and/or constant domains in a single polypeptide molecule. Moreover, an antigen-binding fragment of an antibody described herein may comprise a homo-dimer or hetero-dimer (or other multimer) of any of the variable and constant domain configurations listed above in non-covalent association with one another and/or with one or more monomeric V_{H} or V_{L} domain (e.g., by disulfide bond(s)). The present disclosure includes an antigen-binding fragment of an antigen-binding protein such as an antibody set forth herein.

[0219] Antigen-binding proteins (e.g., antibodies and antigen-binding fragments) may be monospecific or multi-specific (e.g., bispecific). Multispecific antigen-binding proteins are discussed further herein. The present disclosure includes monospecific as well as multispecific (e.g., bispecific) antigen-binding fragments comprising one or more variable domains from an antigen-binding protein that is specifically set forth herein.

[0220] The term “specifically binds” or “binds specifically” refers to those antigen-binding proteins (e.g., antibodies or antigen-binding fragments thereof) having a binding affinity to an antigen, such as human TfR protein, mouse TfR protein or monkey TfR protein, expressed as K_{D}, of at least about 10⁻⁹ M (e.g., 0.01, 0.1, 0.2, 0.3, 0.4, 0.5, 0.6, 0.7, 0.8, 0.9 or 1.0 nM), as measured by real-time, label free bio-layer interferometry assay, for example, at 25° C. or 37° C., e.g., an Octet® HTX biosensor, or by surface plasmon resonance, e.g., BIACORE™, or by solution-affinity ELISA. The present disclosure includes antigen-binding proteins that specifically bind to TfR protein. “Anti-TfR” refers to an antigen-binding protein (or other molecule), for example, an antibody or antigen-binding fragment thereof, that binds specifically to TfR.

[0221] “Isolated” antigen-binding proteins (e.g., antibodies or antigen-binding fragments thereof), polypeptides, polynucleotides and vectors, are at least partially free of other biological molecules from the cells or cell culture from which they are produced. Such biological molecules include nucleic acids, proteins, other antibodies or antigen-binding fragments, lipids, carbohydrates, or other material such as cellular debris and growth medium. An isolated antigen-binding protein may further be at least partially free of expression system components such as biological molecules from a host cell or of the growth medium thereof. Generally, the term “isolated” is not intended to refer to a complete absence of such biological molecules (e.g., minor or insignificant amounts of impurity may remain) or to an absence of water, buffers, or salts or to components of a pharmaceutical formulation that includes the antigen-binding proteins (e.g., antibodies or antigen-binding fragments).

[0222] The present disclosure includes antigen-binding proteins, e.g., antibodies or antigen-binding fragments, that bind to the same epitope as an antigen-binding protein described herein. In some embodiments, provided is an antigen-binding protein that binds specifically to transferrin receptor or an antigenic-fragment thereof or variant thereof which binds to one or more epitopes of hTfR selected from: (a) an epitope comprising the sequence LLNE (SEQ ID NO: 796) and/or an epitope comprising the sequence TYKEL (SEQ ID NO: 706); (b) an epitope comprising the sequence DSTDFTGT (SEQ ID NO: 797) and/or an epitope comprising the sequence VKHPVTGQF (SEQ ID NO: 798) and/or an epitope comprising the sequence IERIPEL (SEQ ID NO: 799); (c) an epitope comprising the sequence LNENSYVPREAGSQKDEN (SEQ ID NO: 800); (d) an epitope comprising the sequence FEDL (SEQ ID NO: 718); (e) an epitope comprising the sequence IVDKNGRL (SEQ ID NO: 801); (f) an epitope comprising the sequence IVDKNGRLVY (SEQ ID NO: 802); (g) an epitope comprising the sequence DQTKF (SEQ ID NO: 803); (h) an epitope comprising the sequence LVENPGGY (SEQ ID NO: 804) and/or an epitope comprising the sequence PIVNAELSF (SEQ ID NO: 805) and/or an epitope comprising the sequence PYLGTTMDT (SEQ ID NO: 806); (i) an epitope comprising the sequence LLNENSYVPREAGSQKDENLAL (SEQ ID NO: 704) and/or an epitope comprising the sequence IYMDQTKFPIVNAEL (SEQ ID NO: 705) and/or an epitope comprising the sequence TYKEL (SEQ ID NO: 706); (j) an epitope comprising the sequence KRKLSEKLDSTDFTGTIKL (SEQ ID NO: 707) and/or an epitope comprising the sequence YTLIEKTMQNVKHPVTGQFL (SEQ ID NO: 708) and/or an epitope comprising the sequence LIERIPELNKVARAAAE (SEQ ID NO: 709); (k) an epitope comprising the sequence LNENSYVPREAGSQKDENL (SEQ ID NO: 710); (1) an epitope comprising the sequence GTKKDFEDL (SEQ ID NO: 711); (m) an epitope comprising the sequence SVIIVDKNGRLVYLVENPGGYVAYSK (SEQ ID NO: 712); (n) an epitope comprising the sequence LLNENSYVPREAGSQKDEN (SEQ ID NO: 713) and/or an epitope comprising the sequence DQTKFPIVNAEL (SEQ ID NO: 714) and/or an epitope comprising the sequence TYKELIERIPELNK (SEQ ID NO: 715); (o) an epitope comprising the sequence LLNENSYVPREAGSQKDEN (SEQ ID NO: 713) and/or an epitope comprising the sequence TYKELIERIPELNK (SEQ ID NO: 715); (p) an epitope comprising the sequence SVIIVDKNGRLVYLVENPGGYVAY (SEQ ID NO: 716); (q) an epitope comprising the sequence IYMDQTKFPIVNAEL (SEQ ID NO: 705) and/or an epitope comprising the sequence FGNMEGDCPSDWKTDSTCRM (SEQ ID NO: 717); (r) an epitope comprising the sequence LLNENSYVPREAGSQKDENLAL (SEQ ID NO: 704) and/or an epitope comprising the sequence LVENPGGYVAYSKAATVTGKL (SEQ ID NO: 719) and/or an epitope comprising the sequence IYMDQTKFPIVNAELSF (SEQ ID NO: 720) and/or an epitope comprising the sequence ISRAAAEKL (SEQ ID NO: 721) and/or an epitope comprising the sequence VTSESKNVKLTVSNVLKE (SEQ ID NO: 722) and/or an epitope comprising the sequence FCEDTDYPYLGTTMDT (SEQ ID NO: 723); (s) an epitope comprised within or overlapping with the sequence LLNENSYVPREAGSQKDENLAL (SEQ ID NO: 704) and/or an epitope comprised within or overlapping with the sequence IYMDQTKFPIVNAEL (SEQ ID NO: 705) and/or an epitope comprised within or overlapping with the sequence TYKEL (SEQ ID NO: 706); (t) an epitope comprised within or overlapping with the sequence KRKLSEKLDSTDFTGTIKL (SEQ ID NO: 707) and/or an epitope comprised within or overlapping with the sequence YTLIEKTMQNVKHPVTGQFL (SEQ ID NO: 708) and/or an epitope comprised within or overlapping with the sequence LIERIPELNKVARAAAE (SEQ ID NO: 709); (u) an epitope comprised within or overlapping with the sequence LNENSYVPREAGSQKDENL (SEQ ID NO: 710); (v) an epitope comprised within or overlapping with the sequence GTKKDFEDL (SEQ ID NO: 711); (w) an epitope comprised within or overlapping with the sequence SVIIVDKNGRLVYLVENPGGYVAYSK (SEQ ID NO: 712); (x) an epitope comprised within or overlapping with the sequence LLNENSYVPREAGSQKDEN (SEQ ID NO: 713) and/or an epitope comprised within or overlapping with the sequence DQTKFPIVNAEL (SEQ ID NO: 714) and/or an epitope comprised within or overlapping with the sequence TYKELIERIPELNK (SEQ ID NO: 715); (y) an epitope comprised within or overlapping with the sequence LLNENSYVPREAGSQKDEN (SEQ ID NO: 713) and/or an epitope comprised within or overlapping with the sequence TYKELIERIPELNK (SEQ ID NO: 715); (z) an epitope comprised within or overlapping with the sequence SVIIVDKNGRLVYLVENPGGYVAY (SEQ ID NO: 716); (aa) an epitope comprised within or overlapping with the sequence IYMDQTKFPIVNAEL (SEQ ID NO: 705) and/or an epitope comprised within or overlapping with the sequence FGNMEGDCPSDWKTDSTCRM (SEQ ID NO: 717); and (bb) an epitope comprised within or overlapping with the sequence LLNENSYVPREAGSQKDENLAL (SEQ ID NO: 704) and/or an epitope comprised within or overlapping with the sequence LVENPGGYVAYSKAATVTGKL (SEQ ID NO: 719) and/or an epitope comprised within or overlapping with the sequence IYMDQTKFPIVNAELSF (SEQ ID NO: 720) and/or an epitope comprised within or overlapping with the sequence ISRAAAEKL (SEQ ID NO: 721) and/or an epitope comprised within or overlapping with the sequence VTSESKNVKLTVSNVLKE (SEQ ID NO: 722) and/or an epitope comprised within or overlapping with the sequence FCEDTDYPYLGTTMDT (SEQ ID NO: 723). In some embodiments, provided is an antigen-binding protein, wherein the antigen binding protein comprises an antibody or antigen-binding fragment thereof which binds to one or more epitopes of hTfR selected from: (a) an epitope consisting of the sequence LLNE (SEQ ID NO: 796) and/or an epitope consisting of the sequence TYKEL (SEQ ID NO: 706); (b) an epitope consisting of the sequence DSTDFTGT (SEQ ID NO: 797) and/or an epitope consisting of the sequence VKHPVTGQF (SEQ ID NO: 798) and/or an epitope consisting of the sequence IERIPEL (SEQ ID NO: 799); (c) an epitope consisting of the sequence LNENSYVPREAGSQKDEN (SEQ ID NO: 800); (d) an epitope consisting of the sequence FEDL (SEQ ID NO: 718); (e) an epitope consisting of the sequence IVDKNGRL (SEQ ID NO: 801); (f) an epitope consisting of the sequence IVDKNGRLVY (SEQ ID NO: 802); (g) an epitope consisting of the sequence DQTKF (SEQ ID NO: 803); (h) an epitope consisting of the sequence LVENPGGY (SEQ ID NO: 804) and/or an epitope consisting of the sequence PIVNAELSF (SEQ ID NO: 805) and/or an epitope consisting of the sequence PYLGTTMDT (SEQ ID NO: 806); (i) an epitope consisting of the sequence LLNENSYVPREAGSQKDENLAL (SEQ ID NO: 704) and/or an epitope consisting of the sequence IYMDQTKFPIVNAEL (SEQ ID NO: 705) and/or an epitope consisting of the sequence TYKEL (SEQ ID NO: 706); (j) an epitope consisting of the sequence KRKLSEKLDSTDFTGTIKL (SEQ ID NO: 707) and/or an epitope consisting of the sequence YTLIEKTMQNVKHPVTGQFL (SEQ ID NO: 708) and/or an epitope consisting of the sequence LIERIPELNKVARAAAE (SEQ ID NO: 709); (k) an epitope consisting of the sequence LNENSYVPREAGSQKDENL (SEQ ID NO: 710); (1) an epitope consisting of the sequence GTKKDFEDL (SEQ ID NO: 711); (m) an epitope consisting of the sequence SVIIVDKNGRLVYLVENPGGYVAYSK (SEQ ID NO: 712); (n) an epitope consisting of the sequence LLNENSYVPREAGSQKDEN (SEQ ID NO: 713) and/or an epitope consisting of the sequence DQTKFPIVNAEL (SEQ ID NO: 714) and/or an epitope consisting of the sequence TYKELIERIPELNK (SEQ ID NO: 715); (o) an epitope consisting of the sequence LLNENSYVPREAGSQKDEN (SEQ ID NO: 713) and/or an epitope consisting of the sequence TYKELIERIPELNK (SEQ ID NO: 715); (p) an epitope consisting of the sequence SVIIVDKNGRLVYLVENPGGYVAY (SEQ ID NO: 716); (q) an epitope consisting of the sequence IYMDQTKFPIVNAEL (SEQ ID NO: 705) and/or an epitope consisting of the sequence FGNMEGDCPSDWKTDSTCRM (SEQ ID NO: 717); and (r) an epitope consisting of the sequence LLNENSYVPREAGSQKDENLAL (SEQ ID NO: 704) and/or an epitope consisting of the sequence LVENPGGYVAYSKAATVTGKL (SEQ ID NO: 719) and/or an epitope consisting of the sequence IYMDQTKFPIVNAELSF (SEQ ID NO: 720) and/or an epitope consisting of the sequence ISRAAAEKL (SEQ ID NO: 721) and/or an epitope consisting of the sequence VTSESKNVKLTVSNVLKE (SEQ ID NO: 722) and/or an epitope consisting of the sequence FCEDTDYPYLGTTMDT (SEQ ID NO: 723).

[0223] An antigen is a molecule, such as a peptide (e.g., TfR or a fragment thereof (an antigenic fragment)), to which, for example, an antibody or antigen-binding fragment thereof binds. The specific region on an antigen that an antibody recognizes and binds to is called the epitope. Antigen-binding proteins (e.g., antibodies) described herein that specifically bind to such antigens are part of the present disclosure.

[0224] The term “epitope” refers to an antigenic determinant (e.g., on TfR) that interacts with a specific antigen-binding site of an antigen-binding protein, e.g., a variable region of an antibody, known as a paratope. A single antigen may have more than one epitope. Thus, different antibodies may bind to different areas on an antigen and may have different biological effects. The term “epitope” may also refer to a site on an antigen to which B and/or T cells respond and/or to a region of an antigen that is bound by an antibody. Epitopes may be defined as structural or functional. Functional epitopes are generally a subset of the structural epitopes and have those residues that directly contribute to the affinity of the interaction. Epitopes may be linear or conformational, that is, composed of non-linear amino acids. In certain embodiments, epitopes may include determinants that are chemically active surface groupings of molecules such as amino acids, sugar side chains, phosphoryl groups, or sulfonyl groups, and, in certain embodiments, may have specific three-dimensional structural characteristics, and/or specific charge characteristics. Epitopes to which antigen-binding proteins described herein bind may be included in fragments of TfR, for example, the extracellular domain thereof. Antigen-binding proteins (e.g., antibodies) described herein that bind to such epitopes are part of the present disclosure.

[0225] Methods for determining the epitope of an antigen-binding protein, e.g., antibody or fragment or polypeptide, include alanine scanning mutational analysis, peptide blot analysis (Reineke (2004) Methods Mol. Biol. 248: 443-63), peptide cleavage analysis, crystallographic studies and NMR analysis. In addition, methods such as epitope excision, epitope extraction and chemical modification of antigens can be employed (Tomer (2000) Prot. Sci. 9: 487-496). Another method that can be used to identify the amino acids within a polypeptide with which an antigen-binding protein (e.g., antibody or fragment or polypeptide) interacts is hydrogen/deuterium exchange detected by mass spectrometry. See, e.g., Ehring (1999) Analytical Biochemistry 267: 252-259; Engen and Smith (2001) Anal. Chem. 73: 256A-265A.

[0226] The present disclosure includes antigen-binding proteins that compete for binding to a TfR epitope as discussed herein, with an antigen-binding protein described herein. The term “competes” as used herein, refers to an antigen-binding protein (e.g., antibody or antigen-binding fragment thereof) that binds to an antigen (e.g., TfR) and inhibits or blocks the binding of another antigen-binding protein (e.g., antibody or antigen-binding fragment thereof) to the antigen. Unless otherwise stated, the term also includes competition between two antigen-binding proteins e.g., antibodies, in both orientations, i.e., a first antibody that binds antigen and blocks binding by a second antibody and vice versa. Thus, in an embodiment, competition occurs in one such orientation. In certain embodiments, the first antigen-binding protein (e.g., antibody) and second antigen-binding protein (e.g., antibody) may bind to the same epitope. Alternatively, the first and second antigen-binding proteins (e.g., antibodies) may bind to different, but, for example, overlapping or non-overlapping epitopes, wherein binding of one inhibits or blocks the binding of the second antibody, e.g., via steric hindrance. Competition between antigen-binding proteins (e.g., antibodies) may be measured by methods known in the art, for example, by a real-time, label-free bio-layer interferometry assay. Also, binding competition between TfR-binding proteins (e.g., monoclonal antibodies (mAbs)) can be determined using a real time, label-free bio-layer interferometry assay on an Octet RED384 biosensor (Pall ForteBio Corp.).

[0227] Typically, an antibody or antigen-binding fragment described herein which is modified in some way retains the ability to specifically bind to TfR, e.g., retains at least 10% of its TfR binding activity (when compared to the parental antibody) when that activity is expressed on a molar basis. Preferably, an antibody or antigen-binding fragment described herein retains at least 20%, 50%, 70%, 80%, 90%, 95% or 100% or more of the TfR binding affinity as the parental antibody. It is also intended that an antibody or antigen-binding fragment described herein may include conservative or non-conservative amino acid substitutions (referred to as “conservative variants” or “function conserved variants” of the antibody) that do not substantially alter its biologic activity.

[0228] An anti-TfR antigen-binding protein provided herein may be a monoclonal antibody or an antigen-binding fragment of a monoclonal antibody which may be tethered to a GAA polypeptide. Provided herein are monoclonal anti-TfR antigen-binding proteins, e.g., antibodies and antigen-binding fragments thereof, as well as monoclonal compositions comprising a plurality of isolated monoclonal antigen-binding proteins. The term “monoclonal antibody” or “mAb,” as used herein, refers to a member of a population of substantially homogeneous antibodies, i.e., the antibody molecules comprising the population are identical in amino acid sequence except for possible naturally occurring mutations that may be present in minor amounts. A “plurality” of such monoclonal antibodies and fragments in a composition refers to a concentration of identical (i.e., as discussed above, in amino acid sequence except for possible naturally occurring mutations that may be present in minor amounts) antibodies and fragments which is above that which would normally occur in nature, e.g., in the blood of a host organism such as a mouse or a human.

[0229] In an embodiment, an anti-TfR antigen-binding protein, e.g., antibody or antigen-binding fragment (which may be tethered to a Payload) comprises a heavy chain constant domain, e.g., of the type IgA (e.g., IgA1 or IgA2), IgD, IgE, IgG (e.g., IgG1, IgG2, IgG3 and IgG4) or IgM. In an embodiment, an antigen-binding protein, e.g., antibody or antigen-binding fragment, comprises a light chain constant domain, e.g., of the type kappa or lambda. In an embodiment, a V_{H} as set forth herein is linked to a human heavy chain constant domain (e.g., IgG) and a V_{L} as set forth herein is linked to a human light chain constant domain (e.g., kappa). The present disclosure includes antigen-binding proteins comprising the variable domains set forth herein, which are linked to a heavy and/or light chain constant domain, e.g., as set forth herein.

[0230] Included herein are human anti-TfR antigen-binding proteins which may be tethered to a GAA polypeptide. The term “human” antigen-binding protein, such as an antibody or antigen-binding fragment, as used herein, includes antibodies and fragments having variable and constant regions derived from human germline immunoglobulin sequences whether in a human cell or grafted into a non-human cell, e.g., a mouse cell. See, e.g., U.S. Pat. No. 8,502,018, 6,596,541 or 5,789,215. The anti-TfR human mAbs provided herein may include amino acid residues not encoded by human germline immunoglobulin sequences (e.g., mutations introduced by random or site-specific mutagenesis in vitro or by somatic mutation in vivo), for example, in the CDRs and in particular CDR3. However, the term “human antibody,” as used herein, is not intended to include mAbs in which CDR sequences derived from the germline of another mammalian species (e.g., mouse) have been grafted onto human FR sequences. The term includes antibodies recombinantly produced in a non-human mammal or in cells of a non-human mammal. The term is not intended to include natural antibodies directly isolated from a human subject. The present disclosure includes human antigen-binding proteins (e.g., antibodies or antigen-binding fragments thereof described herein).

[0231] Also included herein are anti-TfR chimeric antigen-binding proteins, e.g., antibodies and antigen-binding fragments thereof (which may be tethered to a GAA polypeptide), and methods of use thereof. As used herein, a “chimeric antibody” is an antibody having the variable domain from a first antibody and the constant domain from a second antibody, where the first and second antibodies are from different species. (see, e.g., U.S. Pat. No. 4,816,567; and Morrison et al., (1984) Proc. Natl. Acad. Sci. USA 81: 6851-6855). The present disclosure includes chimeric antibodies comprising the variable domains which are set forth herein and a non-human constant domain.

[0232] The term “recombinant” anti-TfR antigen-binding proteins, such as antibodies or antigen-binding fragments thereof (which may be tethered to a GAA polypeptide), refers to such molecules created, expressed, isolated or obtained by technologies or methods known in the art as recombinant DNA technology which include, e.g., DNA splicing and transgenic expression. The term includes antibodies expressed in a non-human mammal (including transgenic non-human mammals, e.g., transgenic mice), or a cell (e.g., CHO cells) such as a cellular expression system or isolated from a recombinant combinatorial human antibody library. The present disclosure includes recombinant antigen-binding proteins, such as antibodies and antigen-binding fragments as set forth herein.

[0233] An antigen-binding fragment of an antibody will, in an embodiment, comprise less than a full antibody but still binds specifically to antigen, e.g., TfR, e.g., including at least one variable domain. The variable domain may be of any size or amino acid composition and will generally comprise at least one (e.g., 3) CDR(s), which is adjacent to or in frame with one or more framework sequences. In antigen-binding fragments having a V_{H} domain associated with a V_{L} domain, the V_{H} and V_{L} domains may be situated relative to one another in any suitable arrangement. For example, the variable region may be dimeric and contain V_{H}-V_{H}, V_{H}-V_{L} or V_{L}-V_{L} dimers. Alternatively, the antigen-binding fragment of an antibody may contain a monomeric V_{H} and/or V_{L} domain which are bound non-covalently.

[0234] In certain embodiments, an antigen-binding fragment of an antibody may contain at least one variable domain covalently linked to at least one constant domain. Non-limiting, exemplary configurations of variable and constant domains that may be found within an antigen-binding fragment of an antibody described herein include: (i) V_{H}-CH1; (ii) V_{H}-CH2; (iii) V_{H}-CH3; (iv) V_{H}-CH1-CH2; (v) V_{H}-CH1-CH2-CH3; (vi) V_{H}-CH2-CH3; (vii) V_{H}-CL; (viii) V_{L}-CH1; (ix) V_{L}-CH2; (x) V_{L}-CH3; (xi) V_{L}-CH1-CH2; (xii) V_{L}-CH1-CH2-CH3; (xiii) V_{L}-CH2-CH3; and (xiv) V_{L}-CL. In any configuration of variable and constant domains, including any of the exemplary configurations listed above, the variable and constant domains may be either directly linked to one another or may be linked by a full or partial hinge or linker region. A hinge region may consist of at least 2 (e.g., 5, 10, 15, 20, 40, 60 or more) amino acids, which result in a flexible or semi-flexible linkage between adjacent variable and/or constant domains in a single polypeptide molecule. Moreover, an antigen-binding fragment of an antibody described herein may comprise a homo-dimer or hetero-dimer (or other multimer) of any of the variable and constant domain configurations listed above in non-covalent association with one another and/or with one or more monomeric V_{H} or V_{L} domain (e.g., by disulfide bond(s)). The present disclosure includes an antigen-binding fragment of an antigen-binding protein such as an antibody set forth herein.

[0235] Antigen-binding proteins (e.g., antibodies and antigen-binding fragments) may be monospecific or multi-specific (e.g., bispecific). Multispecific antigen-binding proteins are discussed further herein. The present disclosure includes monospecific as well as multispecific (e.g., bispecific) antigen-binding fragments comprising one or more variable domains from an antigen-binding protein that is specifically set forth herein.

[0236] A “variant” of a polypeptide, such as an immunoglobulin chain, refers to a polypeptide comprising an amino acid sequence that is at least about 70-99.9% (e.g., at least 70, 72, 74, 75, 76, 79, 80, 81, 82, 83, 84, 85, 86, 87, 88, 89, 90, 91, 92, 93, 94, 95, 96, 97, 98, 99, 99.5, 99.9%) identical or similar to a referenced amino acid sequence that is set forth herein (e.g., any of SEQ ID NOS: 171-174; 680; 176-179; 181-184; 681; 186-189; 191-194; 682; 196-199; 201-204; 206-209; 683; 211-214; 216-219; 684; 221-224; 685; 226-229; 686; 231-234; 687; 236-239; 688; 241-244; 689; 246-249; 690; 251-254; 256-259; 261-264; 691; 266-269; 271-274; 276-279; 281-284; 692; 286-289; 693; 291-294; 296-299; 301-304; 306-309; 311-314; 694; 316-319; 695; 321-324; 326-329; 331-334; 696; 336-339; 341-344; 346-349; 351-354; 697; 356-359; 698; 361-364; 699; 366-369; 371-374; 700; 376-379; 381-384; 386-389; 391-394; 396-399; 401-404; 406-409; 411-414; 416-419; 421-424; 701; 426-429; 431-434; 436-439; 441-444; 446-449; 451-454; 456-459; 461-464; 466-469; 471-474; 702; 476-479; 481-484; 486-489; 703; 492-523, 540-609, 632-638, 737, or 739); when the comparison is performed by a BLAST algorithm wherein the parameters of the algorithm are selected to give the largest match between the respective sequences over the entire length of the respective reference sequences (e.g., expect threshold: 10; word size: 3; max matches in a query range: 0; BLOSUM 62 matrix; gap costs: existence 11, extension 1; conditional compositional score matrix adjustment) and/or comprising the amino acid sequence but having one or more (e.g., 1, 2, 3, 4, 5, 6, 7, 8, 9 or 10) mutations (e.g., point mutation, insertion, truncation, and/or deletion).

[0237] Moreover, a variant of a polypeptide may include a polypeptide such as an immunoglobulin chain which may include the amino acid sequence of the reference polypeptide whose amino acid sequence is specifically set forth herein but for one or more (e.g., 1, 2, 3, 4, 5, 6, 7, 8, 9 or 10) mutations, e.g., one or more missense mutations (e.g., conservative substitutions), non-sense mutations, deletions, or insertions. For example, the present disclosure includes TfR-binding proteins which include an immunoglobulin light chain (or V_{L}) variant comprising the amino acid sequence set forth in SEQ ID NO: 176, 186, 196, 206, 683, 216, 684, 226, 686, 236, 688, 246, 690, 256, 266, 276, 286, 693, 296, 306, 316, 695, 326, 336, 346, 356, 698, 366, 376, 386, 396, 406, 416, 426, 436, 446, 456, 466, 476, 632, 486, or 703 but having one or more of such mutations and/or an immunoglobulin heavy chain (or V_{H}) variant comprising the amino acid sequence set forth in SEQ ID NO: 171, 680, 181, 681, 191, 682, 201, 211, 221, 685, 231, 687, 241, 689, 251, 261, 691, 271, 281, 692, 291, 301, 311, 694, 321, 331, 696, 341, 351, 697, 361, 699, 371, 700, 381, 391, 401, 411, 421, 701, 431, 441, 451, 461, 471, 702, or 481 but having one or more of such mutations. In an embodiment, a TfR-binding protein includes an immunoglobulin light chain variant comprising CDR-L1, CDR-L2 and CDR-L3 wherein one or more (e.g., 1 or 2 or 3) of such CDRs has one or more of such mutations (e.g., conservative substitutions) and/or an immunoglobulin heavy chain variant comprising CDR-H1, CDR-H2 and CDR-H3 wherein one or more (e.g., 1 or 2 or 3) of such CDRs has one or more of such mutations (e.g., conservative substitutions).

[0238] The following references relate to BLAST algorithms often used for sequence analysis: BLAST ALGORITHMS: Altschul et al. (2005) FEBS J. 272(20): 5101-5109; Altschul, S. F., et al., (1990) J. Mol. Biol. 215:403-410; Gish, W., et al., (1993) Nature Genet. 3:266-272; Madden, T. L., et al., (1996) Meth. Enzymol. 266:131-141; Altschul, S. F., et al., (1997) Nucleic Acids Res. 25:3389-3402; Zhang, J., et al., (1997) Genome Res. 7:649-656; Wootton, J. C., et al., (1993) Comput. Chem. 17:149-163; Hancock, J. M. et al., (1994) Comput. Appl. Biosci. 10:67-70; ALIGNMENT SCORING SYSTEMS: Dayhoff, M. O., et al., “A model of evolutionary change in proteins.” in Atlas of Protein Sequence and Structure, (1978) vol. 5, suppl. 3. M. O. Dayhoff (ed.), pp. 345-352, Natl. Biomed. Res. Found., Washington, D.C.; Schwartz, R. M., et al., “Matrices for detecting distant relationships.” in Atlas of Protein Sequence and Structure, (1978) vol. 5, suppl. 3.” M. O. Dayhoff (ed.), pp. 353-358, Natl. Biomed. Res. Found., Washington, D.C.; Altschul, S. F., (1991) J. Mol. Biol. 219:555-565; States, D. J., et al., (1991) Methods 3:66-70; Henikoff, S., et al., (1992) Proc. Natl. Acad. Sci. USA 89:10915-10919; Altschul, S. F., et al., (1993) J. Mol. Evol. 36:290-300; ALIGNMENT STATISTICS: Karlin, S., et al., (1990) Proc. Natl. Acad. Sci. USA 87:2264-2268; Karlin, S., et al., (1993) Proc. Natl. Acad. Sci. USA 90:5873-5877; Dembo, A., et al., (1994) Ann. Prob. 22:2022-2039; and Altschul, S. F. “Evaluating the statistical significance of multiple distinct local alignments.” in Theoretical and Computational Methods in Genome Research (S. Suhai, ed.), (1997) pp. 1-14, Plenum, N.Y.

[0239] A “conservatively modified variant” or a “conservative substitution”, e.g., of an immunoglobulin chain set forth herein, refers to a variant wherein there is one or more substitutions of amino acids in a polypeptide with other amino acids having similar characteristics (e.g., charge, side-chain size, hydrophobicity/hydrophilicity, backbone conformation and rigidity, etc.). Such changes can frequently be made without significantly disrupting the biological activity of the antibody or fragment. Those of skill in this art recognize that, in general, single amino acid substitutions in non-essential regions of a polypeptide do not substantially alter biological activity (see, e.g., Watson et al. (1987) Molecular Biology of the Gene, The Benjamin/Cummings Pub. Co., p. 224 (4^{th} Ed.)). In addition, substitutions of structurally or functionally similar amino acids are less likely to significantly disrupt biological activity. The present disclosure includes TfR-binding proteins comprising such conservatively modified variant immunoglobulin chains.

[0240] Examples of groups of amino acids that have side chains with similar chemical properties include 1) aliphatic side chains: glycine, alanine, valine, leucine and isoleucine; 2) aliphatic-hydroxyl side chains: serine and threonine; 3) amide-containing side chains: asparagine and glutamine; 4) aromatic side chains: phenylalanine, tyrosine, and tryptophan; 5) basic side chains: lysine, arginine, and histidine; 6) acidic side chains: aspartate and glutamate, and 7) sulfur-containing side chains: cysteine and methionine. Alternatively, a conservative replacement is any change having a positive value in the PAM250 log-likelihood matrix disclosed in Gonnet et al. (1992) Science 256: 1443-45.

[0241] Antibodies and antigen-binding fragments described herein comprise immunoglobulin chains including the amino acid sequences specifically set forth herein (and variants thereof) as well as cellular and in vitro post-translational modifications to the antibody or fragment. For example, the present disclosure includes antibodies and antigen-binding fragments thereof that specifically bind to TfR comprising heavy and/or light chain amino acid sequences set forth herein as well as antibodies and fragments wherein one or more asparagine, serine and/or threonine residues is glycosylated, one or more asparagine residues is deamidated, one or more residues (e.g., Met, Trp and/or His) is oxidized, the N-terminal glutamine is pyroglutamate (pyroE) and/or the C-terminal lysine or other amino acid is missing.

[0242] In an embodiment, an anti-hTfR:Payload or anti-hTfR:Payload (e.g., in scFv, Fab, antibody or antigen-binding fragment thereof format), e.g., wherein the Payload is human GAA, exhibits one or more of the following characteristics:
[0243] Affinity (K_{D}) for binding to human TfR at 25° C. in surface plasmon resonance format of about 41 nM or a higher affinity (e.g., about 1 or 0.1 nM or about 0.18 to about 1.2 nM, or higher);
[0244] Affinity (K_{D}) for binding to monkey TfR at 25° C. in surface plasmon resonance format of about 0 nM (no detectable binding) or a higher affinity (e.g., about 20 nM or higher);
[0245] Ratio of K_{D} for binding to monkey TfR/human TfR at 25° C. in surface plasmon resonance format of from 0 to 278 (e.g., about 17 or 18);
[0246] Blocks about 3, 5, 10 or 13% hTfR (e.g., Hmm-hTFRC such as REGN2431) binding to Human Holo-Tf when in Fab format (IgG1), e.g., no more than about 45% blocking;
[0247] Blocks about 6, 8, 10 or 13% hTfR (e.g., Hmm-hTFRC such as REGN2431) binding to Human Holo-Tf when in scFv (V_{K}-V_{H}) format, e.g., no more than about 45% blocking;
[0248] Blocks about 11, 17, 23 or 26% hTfR (e.g., Hmm-hTFRC such as REGN2431) binding to Human Holo-Tf when in scFv (V_{H}-V_{L}) format, e.g., no more than about 45% blocking;
[0249] Exhibits a ratio of about 1 or greater; 0.67 or greater; 1.08 or greater; 0.91 or greater; 0.65 or greater; 0.55 or greater; 0.50 or greater; 0.27 or greater; 0.72 or greater; 1.05 or greater; 0.49 or greater; 0.29 or greater; 1.29 or greater; 1.72 or greater; 1.79 or greater; 3.08 or greater; 1.24 or greater; 0.59 or greater; or 0.47 or greater (or about 1-2 or greater) mature hGAA protein in brain (normalized to that of positive control 8D3:GAA scFv) in mice (e.g., Tfrc^{hum/hum} knock-in mice) administered the molecule via HDD, when in anti-hTfR scFv:hGAA format; or delivers mature human GAA protein to the brain of humans administered said scFv:hGAA molecule;
[0250] Exhibits a ratio of about 0.44, 0.05, 1.13 or 0.60 (about 0.1-1.2) mature hGAA protein in brain parenchyma (normalized to that of positive control 8D3:GAA scFv) in mice (e.g., Tfrc^{hum/hum} knock-in mice) administered the molecule via HDD, when in anti-hTfR scFv:hGAA format; or delivers mature human GAA protein to the brain parenchyma of humans administered said scFv:hGAA molecule;
[0251] Exhibits a ratio of about 0.67, 1.80, 1.78 or 7.74 (about 1-2) mature hGAA protein in quadriceps (normalized to that of positive control 8D3:GAA scFv) in mice (e.g., Tfrc^{hum/hum} knock-in mice) administered the molecule via HDD, when in anti-hTfR scFv:hGAA format; or delivers mature human GAA protein to the quadricep or other muscle tissue of humans administered said scFv:hGAA molecule;
[0252] Exhibits a ratio of about 0.94, 0.49, 0.61 or 1.90 (about 0.1-1.2) mature hGAA protein in brain parenchyma (normalized to that of positive control 8D3:GAA scFv) in mice (e.g., Tfrc^{hum} knock-in mice) administered the molecule via AAV8 liver depot, when in anti-hTfR scFv:hGAA format; or delivers mature human GAA protein to the brain parenchyma of humans administered said scFv:hGAA molecule via viral, e.g., AAV, liver depot or parenterally delivered in protein scFv:hGAA fusion format;
[0253] Delivers mature hGAA protein to serum, liver, cerebrum, cerebellum, spinal cord, heart and/or quadricep in mice (e.g., Tfrc^{hum} knock-in mice) administered the molecule via AAV8 liver depot, when in anti-hTfR scFv:hGAA format; or delivers mature human GAA protein to the serum, liver, cerebrum, cerebellum, spinal cord, heart and/or quadricep of humans administered said scFv:hGAA molecule via viral, e.g., AAV, liver depot or parenterally delivered in protein scFv:hGAA fusion format;
[0254] Reduces glycogen stored in cerebrum, cerebellum, spinal cord, heart and/or quadricep in mice (e.g., Tfrc^{hum} knock-in mice) administered the molecule via AAV8 liver depot, when in anti-hTfR scFv:hGAA format; e.g., by at least 75% to greater than 95% or greater than 99%; or reduces glycogen stored in cerebrum, cerebellum, spinal cord, heart and/or quadricep of humans administered said scFv:hGAA molecule via viral, e.g., AAV, liver depot, or parenterally delivered in protein scFv:hGAA fusion format;
[0255] Reduces glycogen levels in tissues (e.g., cerebellum) of Gaa^{-/-}/Tfrc^{hum} mice treated with liver-depot AAV8 anti-hTFRC scfv:hGAA (e.g., 4e11 vg/kg AAV8) by at least about 90% (e.g., about 95% or more) relative to untreated Gaa^{-/-}/Tfrc^{hum} mice;
[0256] Reduces glycogen levels in tissues (e.g., quadricep) of Gaa^{-/-}/Tfrc^{hum} mice treated with liver-depot AAV8 anti-hTFRC scfv:hGAA (e.g., 4e11 vg/kg AAV8) by at least about 89% (e.g., about 90% or 91% or more) relative to untreated Gaa^{-/-}/Tfrc^{hum} mice; or of humans treated with the fusion, e.g., by parenteral deliver of the fusion protein;
[0257] Does not cause abnormal iron homeostasis when administered (e.g., by HDD or AAV8 episomal liver depot) to Tfrc^{hum} mice; e.g., wherein the mice maintain normal serum, heart, liver and/or spleen iron levels, normal total iron-binding capacity (TIBC), and/or normal hepcidin levels); or when administered to humans, e.g., by parenteral deliver of the fusion protein;
[0258] When chromosomally inserted (e.g., into the albumin gene locus) or delivered episomally to a subject (e.g., to a human or Gaa^{-/-}/Tfrc^{hum/hum} mouse), for example, in an AAV8 vector, DNA encoding the fusion causes expression of mature human GAA to serum, liver, cerebrum and/or quadricep; and/or
[0259] When chromosomally inserted (e.g., into the albumin gene locus) or delivered episomally (e.g., to a human or Gaa^{-/-}/Tfrc^{hum/hum} mouse), for example, in an AAV8 vector, DNA encoding the fusion reduces glycogen levels in the cerebrum and/or quadricep.
[0260] Tfrc^{hum} or Tfrc^{hum/hum} are homozygous knock-in mice.

[0261] The amino acid sequences of domains in anti-human transferrin receptor antigen-binding proteins of fusions disclosed herein are summarized below in Table 2. For example, anti-human transferrin receptor 1 antibodies and antigen-binding fragments thereof (e.g., scFvs and Fabs) comprising the HCVR and LCVR of the molecules in Table 2; or comprising the CDRs thereof, fused to a GAA polypeptide, are disclosed herein. In a specific example, the anti-human transferrin receptor 1 antibodies and antigen-binding fragments thereof (e.g., scFvs and Fabs) comprise the HCVR and LCVR of or comprise the CDRs of #23 or #25 in Table 2. In a specific example, the anti-human transferrin receptor 1 antibodies and antigen-binding fragments thereof (e.g., scFvs and Fabs) comprise the HCVR and LCVR of or comprise the CDRs of #23 in Table 2. In a specific example, the anti-human transferrin receptor 1 antibodies and antigen-binding fragments thereof (e.g., scFvs and Fabs) comprise the HCVR and LCVR of or comprise the CDRs of #25 in Table 2.

TABLE 2
Domains in Anti-hTfR Antibodies, Antigen-binding Fragments
(e.g., Fabs) or scFv Molecules in Fusion Proteins.

| | anti- | HC- | | | | | LC- | | | | |
|---|---|---|---|---|---|---|---|---|---|---|---|
| | hTfR | VR | HC-VR | | | | VR | LC-VR | | | |
| # | Molecule | NT | AA | HCDR1 | HCDR2 | HCDR3 | NT | AA | LCDR1 | LCDR2 | LCDR3 |
| 1 | 31874B | 170 | 171 or 680 | 172 | 173 | 174 | 175 | 176 | 177 | 178 | 179 |
| 2 | 31863B | 180 | 181 or 681 | 182 | 183 | 184 | 185 | 186 | 187 | 188 | 189 |
| 3 | 69348 | 190 | 191 or 682 | 192 | 193 | 194 | 195 | 196 | 197 | 198 | 199 |
| 4 | 69340 | 200 | 201 | 202 | 203 | 204 | 205 | 206 or 683 | 207 | 208 | 209 |
| 5 | 69331 | 210 | 211 | 212 | 213 | 214 | 215 | 216 or 684 | 217 | 218 | 219 |
| 6 | 69332 | 220 | 221 or 685 | 222 | 223 | 224 | 225 | 226 or 686 | 227 | 228 | 229 |
| 7 | 69326 | 230 | 231 or 687 | 232 | 233 | 234 | 235 | 236 or 688 | 237 | 238 | 239 |
| 8 | 69329 | 240 | 241 or 689 | 242 | 243 | 244 | 245 | 246 or 690 | 247 | 248 | 249 |
| 9 | 69323 | 250 | 251 | 252 | 253 | 254 | 255 | 256 | 257 | 258 | 259 |
| 10 | 69305 | 260 | 261 or 691 | 262 | 263 | 264 | 265 | 266 | 267 | 268 | 269 |
| 11 | 69307 | 270 | 271 | 272 | 273 | 274 | 275 | 276 | 277 | 278 | 279 |
| 12 | 12795B | 280 | 281 or 692 | 282 | 283 | 284 | 285 | 286 or 693 | 287 | 288 | 289 |
| 13 | 12798B | 290 | 291 | 292 | 293 | 294 | 295 | 296 | 297 | 298 | 299 |
| 14 | 12799B | 300 | 301 | 302 | 303 | 304 | 305 | 306 | 307 | 308 | 309 |
| 15 | 12801B | 310 | 311 or 694 | 312 | 313 | 314 | 315 | 316 or 695 | 317 | 318 | 319 |
| 16 | 12802B | 320 | 321 | 322 | 323 | 324 | 325 | 326 | 327 | 328 | 329 |
| 17 | 12808B | 330 | 331 or 696 | 332 | 333 | 334 | 335 | 336 | 337 | 338 | 339 |
| 18 | 12812B | 340 | 341 | 342 | 343 | 344 | 345 | 346 | 347 | 348 | 349 |
| 19 | 12816B | 350 | 351 or 697 | 352 | 353 | 354 | 355 | 356 or 698 | 357 | 358 | 359 |
| 20 | 12833B | 360 | 361 or 699 | 362 | 363 | 364 | 365 | 366 | 367 | 368 | 369 |
| 21 | 12834B | 370 | 371 or 700 | 372 | 373 | 374 | 375 | 376 | 377 | 378 | 379 |
| 22 | 12835B | 380 | 381 | 382 | 383 | 384 | 385 | 386 | 387 | 388 | 389 |
| 23 | 12847B | 390 | 391 | 392 | 393 | 394 | 395 | 396 | 397 | 398 | 399 |
| 24 | 12848B | 400 | 401 | 402 | 403 | 404 | 405 | 406 | 407 | 408 | 409 |
| 25 | 12843B | 410 | 411 | 412 | 413 | 414 | 415 | 416 | 417 | 418 | 419 |
| 26 | 12844B | 420 | 421 or 701 | 422 | 423 | 424 | 425 | 426 | 427 | 428 | 429 |
| 27 | 12845B | 430 | 431 | 432 | 433 | 434 | 435 | 436 | 437 | 438 | 439 |
| 28 | 12839B | 440 | 441 | 442 | 443 | 444 | 445 | 446 | 447 | 448 | 449 |
| 29 | 12841B | 450 | 451 | 452 | 453 | 454 | 455 | 456 | 457 | 458 | 459 |
| 30 | 12850B | 460 | 461 | 462 | 463 | 464 | 465 | 466 | 467 | 468 | 469 |
| 31 | 69261 | 470 | 471 or 702 | 472 | 473 | 474 | 475 | 476 or 632 | 477 | 478 | 479 |
| 32 | 69263 | 480 | 481 | 482 | 483 | 484 | 485 | 486 or 703 | 487 | 488 | 489 |

31874B
HCVR (V_{H}) Nucleotide Sequence
(SEQ ID NO: 170)
GAGGTGCAGCTGGTGGAGTCTGGGGGAGGCTTGGTACAGCCTGGGGGGTCCCTGAGACTCTCCTGTGCAGCCTCTGG
ATTCGCCTTTAGCAGCTATGCCATGACCTGGGTCCGACAGGCTCCAGGGAAGGGGCTGGAGTGGGTCTCAGTTATCA
GTGGTACTGGTGGTAGTACATACTACGCAGACTCCGTGAAGGGCCGGTTCACCATCTCCAGAGACAATTCCAAGAAC
ACGCTGTATCTACAAATGAACAGCCTGAGAGCCGAGGACACGGCCGTATATTACTGTGCGAAAGGGGGAGCAGCTCG
TAGAATGGAATACTTCCAGTACTGGGGCCAGGGCACCCTGGTCACCGTCTCCTCA
HCVR (V_{H}) Amino Acid Sequence
(SEQ ID NO: 171)
EVQLVESGGGLVQPGGSLRLSCAASGFAFSSYAMTWVRQAPGKGLEWVSVISGTGGSTYYADSVKGRFTISRDNSKN
TLYLQMNSLRAEDTAVYYCAKGGAARRMEYFQYWGQGTLVTVSS
or
(SEQ ID NO: 680)
EVQLVESGGGLVQPGGSLRLSCAASGFAFSSYAMTWVRQAPGKGLEWVSVISGTGGSTYYADSVKGRFTISRDNSKN
TLYLQMNSLRAEDTAVYYCAKGGAARRMEYFQYWGQGTTVTVSS
HCDR1:
(SEQ ID NO: 172)
GFAFSSYA
HCDR2:
(SEQ ID NO: 173)
ISGTGGST
HCDR3:
(SEQ ID NO: 174)
AKGGAARRMEYFQY
LCVR (V_{L}) Nucleotide Sequence
(SEQ ID NO: 175)
GACATCCAGATGACCCAGTCTCCATCCTCCCTGTCTGCATCTGTAGGAGACAGAGTCACCATCACTTGCCGGGCGAG
TCAGGGCATTAGCAATTATTTAGCCTGGTATCAGCAGAAACCAGGGAAAGTTCCTAACCTCCTTATCTATGCTGCAT
CCACTTTGCAATCAGGGGTCCCATCTCGATTCAGTGGCAGTGGATCTGGGACAGATTTCACTCTCACCATCAGCAGC
CTGCAGCCTGAAGATGTTGCAACTTATTACTGTCAAAAGTATAACAGTGCCCCTCTCACTTTCGGCGGAGGGACCAA
GGTGGAGATCAAA
LCVR (V_{L}) Amino Acid Sequence
(SEQ ID NO: 176)
DIQMTQSPSSLSASVGDRVTITCRASQGISNYLAWYQQKPGKVPNLLIYAASTLQSGVPSRFSGSGSGTDFTLTISS
LQPEDVATYYCQKYNSAPLTFGGGTKVEIK
LCDR1:
(SEQ ID NO: 177)
QGISNY
LCDR2:
(SEQ ID NO: 178)
AAS
LCDR3:
(SEQ ID NO: 179)
QKYNSAPLT
31863B
HCVR (V_{H}) Nucleotide Sequence
(SEQ ID NO: 180)
GAGGTGCAGCTGGTGGAGTCTGGGGGAGGCTTGGTACAGCCTGGGGGGTCCCTGAGACTCTCCTGTGCAGCCTCTGG
ATTCACCTTTAACAGCTATGCCATGACCTGGGTCCGCCAGGCTCCAGGGAAGGGGCTGGAGTGGGTCTCATTTATTG
GTGGTAGTACTGGTAACACATACTACGCAGGCTCCGTGAAGGGCCGGTTCACCATCTCCAGCGACAATTCCAAGAAG
ACGCTGTATCTGCAAATGAACAGCCTGAGAGCCGAGGACACGGCCGTATATTACTGTGCGAAAGGGGGAGCAGCTCG
TAGAATGGAATACTTCCAGCACTGGGGCCAGGGCACCCTGGTCACCGTCTCCTCA
HCVR (V_{H}) Amino Acid Sequence
(SEQ ID NO: 181)
EVQLVESGGGLVQPGGSLRLSCAASGFTFNSYAMTWVRQAPGKGLEWVSFIGGSTGNTYYAGSVKGRFTISSDNSKK
TLYLQMNSLRAEDTAVYYCAKGGAARRMEYFQHWGQGTLVTVSS
or
(SEQ ID NO: 681)
EVQLVESGGGLVQPGGSLRLSCAASGFTFNSYAMTWVRQAPGKGLEWVSFIGGSTGNTYYAGSVKGRFTISSDNSKK
TLYLQMNSLRAEDTAVYYCAKGGAARRMEYFQHWGQGTTVTVSS
HCDR1:
(SEQ ID NO: 182)
GFTFNSYA
HCDR2:
(SEQ ID NO: 183)
IGGSTGNT
HCDR3:
(SEQ ID NO: 184)
AKGGAARRMEYFQH
LCVR (V_{L}) Nucleotide Sequence
(SEQ ID NO: 185)
GACATCCAGATGACCCAGTCTCCATCCTCCCTGTCTGCATCTATAGGAGACAGAGTCACCATCACTTGCCGGGCGAG
TCAGGGCATTAGCAATTATTTAGCCTGGTATCAACAGAAACCAGGGAAAGTTCCTAAGCTCCTGATCTATGCTGCAT
CCACTTTGCAATCAGGGGTCCCATCTCGGTTCAGTGGCAGTGGATCTGGGACAGATTTCACTCTCACCATCAGCAGC
CTGCAGCCTGAAGATGTTGCAACTTATTACTGTCAAAACCATAACAGTGTCCCTCTCACTTTCGGCGGAGGGACCAA
GGTGGAGATCAAA
LCVR (V_{L}) Amino Acid Sequence
(SEQ ID NO: 186)
DIQMTQSPSSLSASIGDRVTITCRASQGISNYLAWYQQKPGKVPKLLIYAASTLQSGVPSRFSGSGSGTDFTLTISS
LQPEDVATYYCQNHNSVPLTFGGGTKVEIK
LCDR1:
(SEQ ID NO: 187)
QGISNY
LCDR2:
(SEQ ID NO: 188)
AAS
LCDR3:
(SEQ ID NO: 189)
QNHNSVPLT
69348
HCVR (V_{H}) Nucleotide Sequence
(SEQ ID NO: 190)
CAGGTGCAGCTGGTGGAGTCTGGGGGAGGCGTGGTCCAGCCTGGGAGGTCCCTGAGACTCTCCTGTGCAGCGTCTGG
ATTCACCTTCACTACCTATGGCATGCACTGGGTCCGCCAGGCTCCAGGCAAGGGGCTGGAGTGGGTGGCTGTTATAT
GGTATGATGGAAGTAATAAATATTATGGAGACTCCGTGAAGGGCCGATTCACCATCTCCAGAGACAATTCCAAGAAC
ACACTGTATCTGCAAATGAACAGCCTGAGAGTCGACGACACGGCTGTTTATTACTGTACGAGAACCCATGGCTATAC
CAGGTCGTCGGACGGTTTTGACTACTGGGGCCAGGGAACCCTGGTCACCGTCTCCTCA
HCVR (V_{H}) Amino Acid Sequence
(SEQ ID NO: 191)
QVQLVESGGGVVQPGRSLRLSCAASGFTFTTYGMHWVRQAPGKGLEWVAVIWYDGSNKYYGDSVKGRFTISRDNSKN
TLYLQMNSLRVDDTAVYYCTRTHGYTRSSDGFDYWGQGTLVTVSS
or
(SEQ ID NO: 682)
EVQLVESGGGVVQPGRSLRLSCAASGFTFTTYGMHWVRQAPGKGLEWVAVIWYDGSNKYYGDSVKGRFTISRDNSKN
TLYLQMNSLRVDDTAVYYCTRTHGYTRSSDGFDYWGQGTMVTVSS
HCDR1:
(SEQ ID NO: 192)
GFTFTTYG
HCDR2:
(SEQ ID NO: 193)
IWYDGSNK
HCDR3:
(SEQ ID NO: 194)
TRTHGYTRSSDGFDY
LCVR (V_{L}) Nucleotide Sequence
(SEQ ID NO: 195)
GACATCCAGATGACCCAGTCTCCATCCTCCCTGTCTGCATCTGTAGGAGACAGAGTCACCATCACTTGCCGGGCAAG
TCAGAGCATTAGAAATGTTTTAGGCTGGTTTCAGCAGAAACCAGGGAAAGCCCCTCAGCGCCTGATCTATGCTGCAT
CCAGTTTGCAAAGTGGGGTCCCATCAAGGTTCAGCGGCAGTGGATCTGGGACAGAATTCACTCTCACAATCAGCAGC
CTACAGCCTGAAGATTTTGCAACTTATTACTGTCTACAGCATAATTTTTACCCGCTCACTTTCGGCGGAGGGACCAA
GGTGGAGATCAAA
LCVR (V_{L}) Amino Acid Sequence
(SEQ ID NO: 196)
DIQMTQSPSSLSASVGDRVTITCRASQSIRNVLGWFQQKPGKAPQRLIYAASSLQSGVPSRFSGSGSGTEFTLTISS
LQPEDFATYYCLQHNFYPLTFGGGTKVEIK
LCDR1:
(SEQ ID NO: 197)
QSIRNV
LCDR2:
(SEQ ID NO: 198)
AAS
LCDR3:
(SEQ ID NO: 199)
LQHNFYPLT
69340
HCVR (V_{H}) Nucleotide Sequence
(SEQ ID NO: 200)
GAAGTGCAGCTGGTGGAGTCTGGGGGAGGCTTGGTACAGCCTGGCAGGTCCCTGAGACTCTCCTGTGCAGCCTCTGG
ATTCACCTTTGATGATAAAGCCATGCACTGGGTCCGGCAAGTTCCAGGGAAGGGCCTGGAATGGATCTCAGGTATTA
GTTGGAATAGTGGTACTATAGGCTATGCGGACTCTGTGAAGGGCCGATTCATCATCTCCAGAGACAACGCCAAGAAC
TCCCTGTATCTACAAATGAACAGTCTGAGAGCTGAGGACACGGCCTTGTATTACTGCGCAAAAGATGGAGATACCAG
TGGCTGGTACTGGTACGGTTTGGACGTCTGGGGCCAAGGGACCACGGTCACCGTCTCCTCA
HCVR (V_{H}) Amino Acid Sequence
(SEQ ID NO: 201)
EVQLVESGGGLVQPGRSLRLSCAASGFTFDDKAMHWVRQVPGKGLEWISGISWNSGTIGYADSVKGRFIISRDNAKN
SLYLQMNSLRAEDTALYYCAKDGDTSGWYWYGLDVWGQGTTVTVSS
HCDR1:
(SEQ ID NO: 202)
GFTFDDKA
HCDR2:
(SEQ ID NO: 203)
ISWNSGTI
HCDR3:
(SEQ ID NO: 204)
AKDGDTSGWYWYGLDV
LCVR (V_{L}) Nucleotide Sequence
(SEQ ID NO: 205)
GAAATTGTGTTGACACAGTCTCCTGCCACCCTGTCTTTGTCTCCAGGGGAAAGAGCCACCCTCTCCTGCAGGGCCAG
TCAGAGTGTTAGCAGCTACTTAGCCTGGTACCAACAGAAACCTGGCCAGGCTCCCAGGCTCCTCATCCATGATGTAT
CCAACAGGGCCACTGGCATCCCAGCCAGGTTCAGTGGCAGTGGGTCTGGGACAGACTTCACTCTCACCATCAGCAGT
CTAGAGCCTGAAGATTTTGTAGTTTATTACTGTCAGCAGCGTAGCGACTGGCCCATCACCTTCGGCCAAGGGACACG
ACTGGAGATTAAA
LCVR (V_{L}) Amino Acid Sequence
(SEQ ID NO: 206)
EIVLTQSPATLSLSPGERATLSCRASQSVSSYLAWYQQKPGQAPRLLIHDVSNRATGIPARFSGSGSGTDFTLTISS
LEPEDFVVYYCQQRSDWPITFGQGTRLEIK
or
(SEQ ID NO: 683)
DIVMTQSPATLSLSPGERATLSCRASQSVSSYLAWYQQKPGQAPRLLIHDVSNRATGIPARFSGSGSGTDFTLTISS
LEPEDFVVYYCQQRSDWPITFGQGTRLEIK
LCDR1:
(SEQ ID NO: 207)
QSVSSY
LCDR2:
(SEQ ID NO: 208)
DVS
LCDR3:
(SEQ ID NO: 209)
QQRSDWPIT
69331
HCVR (V_{H}) Nucleotide Sequence
(SEQ ID NO: 210)
CAGGTGCAGCTGGTGGAGTCTGGGGGAGGCGTGGTCCAGCCTGGGAGGTCCCTGAGACTCTCCTGTATAGCCTCTGG
ATTCACCTTCAGTGTCTATGGCATTCACTGGGTCCGCCAGGCTCCAGGCAAGGGGCTGGAGTGGATGGCAGTAATAT
CACATGATGGAAATATTAAACACTATGCAGACTCCGTGAAGGGCCGATTCACCATCTCCAGAGACAATTCCAAGAAC
ACGCTGTATCTTCAAATTAACAGCCTGAGAACTGAGGACACGGCTGTGTATTACTGTGCGAAAGATACCTGGAACTC
CCTTGATACTTTTGATATCTGGGGCCAAGGGACAATGGTCACCGTCTCTTCA
HCVR (V_{H}) Amino Acid Sequence
(SEQ ID NO: 211)
QVQLVESGGGVVQPGRSLRLSCIASGFTFSVYGIHWVRQAPGKGLEWMAVISHDGNIKHYADSVKGRFTISRDNSKN
TLYLQINSLRTEDTAVYYCAKDTWNSLDTFDIWGQGTMVTVSS
HCDR1:
(SEQ ID NO: 212)
GFTFSVYG
HCDR2:
(SEQ ID NO: 213)
ISHDGNIK
HCDR3:
(SEQ ID NO: 214)
AKDTWNSLDTFDI
LCVR (V_{L}) Nucleotide Sequence
(SEQ ID NO: 215)
GACATCCAGTTGACCCAGTCTCCATCCTCCCTGTCTGCATCTGTAGGAGACAGAGTCACCATCACTTGCTGGGCCAG
TCAGGGCATTAGCAGTTATTTAGCCTGGTATCAGCAAAAACCAGGGAAAGCCCCTAAGCTCCTGATCTATGCTGCAT
CCACTTTGCAAAGTGGGGTCCCATCAAGGTTCAGCGGCAGTGGATCTGGGACAGAATTCACTCTCACAATCAGCAGC
CTGCAGCCTGAAGATTTTGCAACTTATTACTGTCAACAGCTTAATAGTTACCCTCTCACTTTCGGCGGAGGGACCAA
GGTGGAGATCAAA
LCVR (V_{L}) Amino Acid Sequence
(SEQ ID NO: 216)
DIQLTQSPSSLSASVGDRVTITCWASQGISSYLAWYQQKPGKAPKLLIYAASTLQSGVPSRFSGSGSGTEFTLTISS
LQPEDFATYYCQQLNSYPLTFGGGTKVEIK
or
(SEQ ID NO: 684)
DIQMTQSPSSLSASVGDRVTITCWASQGISSYLAWYQQKPGKAPKLLIYAASTLQSGVPSRFSGSGSGTEFTLTISS
LQPEDFATYYCQQLNSYPLTFGGGTKVEIK
LCDR1:
(SEQ ID NO: 217)
QGISSY
LCDR2:
(SEQ ID NO: 218)
AAS
LCDR3:
(SEQ ID NO: 219)
QQLNSYPLT
69332
HCVR (V_{H}) Nucleotide Sequence
(SEQ ID NO: 220)
CAGGTCACCTTGAGGGAGTCTGGTCCCGCGCTGGTGAAACCCTCACAGACCCTCACACTGACCTGCACCTTCTCTGG
ATTCTCACTCAACACTTATGGGATGTTTGTGAGCTGGATCCGTCAGCCTCCAGGGAAGGCCCTAGAGTGGCTTGCAC
ACATTCATTGGGATGATGATAAATACTACAGCACATCTCTGAAGACCAGGCTCACCATCTCCAAGGACACCTCCAAA
AACCAGGTGGTCCTTACAATGACCAACATGGACCCTGTGGACACAGCCACGTATTATTGTGCACGGGGGCACAATAA
TTTGAACTACATCATCCACTGGGGCCAGGGAACCCTGGTCACCGTCTCCTCA
HCVR (V_{H}) Amino Acid Sequence
(SEQ ID NO: 221)
QVTLRESGPALVKPSQTLTLTCTFSGFSLNTYGMFVSWIRQPPGKALEWLAHIHWDDDKYYSTSLKTRLTISKDTSK
NQVVLTMTNMDPVDTATYYCARGHNNLNYIIHWGQGTLVTVSS
or
(SEQ ID NO: 685)
QVQLVESGPALVKPSQTLTLTCTFSGFSLNTYGMFVSWIRQPPGKALEWLAHIHWDDDKYYSTSLKTRLTISKDTSK
NQVVLTMTNMDPVDTATYYCARGHNNLNYIIHWGQGTLVTVSS
HCDR1:
(SEQ ID NO: 222)
GFSLNTYGMF
HCDR2:
(SEQ ID NO: 223)
IHWDDDK
HCDR3:
(SEQ ID NO: 224)
ARGHNNLNYIIH
LCVR (V_{L}) Nucleotide Sequence
(SEQ ID NO: 225)
GCCATCCAGATGACCCAGTCTCCATCCTCCCTGTCTGCATCTGTAGGAGACAGAGTCACCATCACTTGCCGGGCAAG
TCAGGGCATTAGAAATGATTTAGGCTGGTATCAGCAGAAACCAGGGAAAGCCCCTAAGCTCCTGATCTATGCTGCAT
CCACTTTACAAAGTGGGGTCCCATCAAGGTTCAGCGGCAGTGGATCTGGCACAGATTTCACTCTCACCATCAGCAGC
CTGCAGCCTGAAGATTTTGCAACTTATTACTGTCTACAAGATTACAATTACCCATTCACTTTCGGCCCTGGGACCAA
AGTGGATATCAAA
LCVR (V_{L}) Amino Acid Sequence
(SEQ ID NO: 226)
AIQMTQSPSSLSASVGDRVTITCRASQGIRNDLGWYQQKPGKAPKLLIYAASTLQSGVPSRFSGSGSGTDFTLTISS
LQPEDFATYYCLQDYNYPFTFGPGTKVDIK
or
(SEQ ID NO: 686)
DILMTQSPSSLSASVGDRVTITCRASQGIRNDLGWYQQKPGKAPKLLIYAASTLQSGVPSRFSGSGSGTDFTLTISS
LQPEDFATYYCLQDYNYPFTFGPGTKVEIK
LCDR1:
(SEQ ID NO: 227)
QGIRND
LCDR2:
(SEQ ID NO: 228)
AAS
LCDR3:
(SEQ ID NO: 229)
LQDYNYPFT
69326
HCVR (V_{H}) Nucleotide Sequence
(SEQ ID NO: 230)
GAGGTGCAGCTGGTGGAGTCTGGGGGAGGCTTGGTACAGCCTGGAGGGTCCCTGAGACTCTCCTGTGCAGTCTCTGG
ATTCATCTTCAGTAGTTATGAAATGAACTGGGTCCGCCAGGCTCCAGGGAAGGGGCTGGAGTGGGTTTCATACATTA
GTAGTAGTGGTAGTACCATATTCTACGCAGACTCTGTGAAGGGCCGATTCACCATCTCCAGAGACAACGCCAAGAAC
TCACTGTATCTGCAAATGAACAGCCTGAGAGCCGAGGACACGGCTGTTTATTACTGTGTGTCTGGAGTGGTCCTTTT
TGATGTCTGGGGCCAAGGGACAATGGTCACCGTCTCTTCA
HCVR (V_{H}) Amino Acid Sequence
(SEQ ID NO: 231)
EVQLVESGGGLVQPGGSLRLSCAVSGFIFSSYEMNWVRQAPGKGLEWVSYISSSGSTIFYADSVKGRFTISRDNAKN
SLYLQMNSLRAEDTAVYYCVSGVVLFDVWGQGTMVTVSS
or
(SEQ ID NO: 687)
QVQLVESGGGLVQPGGSLRLSCAVSGFIFSSYEMNWVRQAPGKGLEWVSYISSSGSTIFYADSVKGRFTISRDNAKN
SLYLQMNSLRAEDTAVYYCVSGVVLFDVWGQGTMVTVSS
HCDR1:
(SEQ ID NO: 232)
GFIFSSYE
HCDR2:
(SEQ ID NO: 233)
ISSSGSTI
HCDR3:
(SEQ ID NO: 234)
VSGVVLFDV
LCVR (V_{L}) Nucleotide Sequence
(SEQ ID NO: 235)
GAAATAGTGATGACGCAGTCTCCAGCCACCCTGTCTGTGTCTCCGGGGGAAAGAGCCACCCTCTCCTGCAGGGCCAG
TCAGAGTGTTAGCAGCAACTTTGCCTGGTACCAACAGAAACCTGGCCAGGCTCCCAGGCTCCTCATCTATAGTGCAT
CCTCCAGGGCCACTGGTATCCCAGTCAGGTTCAGTGGCAGTGGGTCTGGGACAGAGTTCACTCTCACCATCAGCAGC
CTGCAGTCTGAAGATTTTGCAGTTTATTACTGTCAGCAGTATAATATCTGGCCTCGGACGTTCGGCCAAGGGACCAA
GGTGGAAATCAAA
LCVR (V_{L}) Amino Acid Sequence
(SEQ ID NO: 236)
EIVMTQSPATLSVSPGERATLSCRASQSVSSNFAWYQQKPGQAPRLLIYSASSRATGIPVRFSGSGSGTEFTLTISS
LQSEDFAVYYCQQYNIWPRTFGQGTKVEIK
or
(SEQ ID NO: 688)
DIVMTQSPATLSVSPGERATLSCRASQSVSSNFAWYQQKPGQAPRLLIYSASSRATGIPVRFSGSGSGTEFTLTISS
LQSEDFAVYYCQQYNIWPRTFGQGTKVEIK
LCDR1:
(SEQ ID NO: 237)
QSVSSN
LCDR2:
(SEQ ID NO: 238)
SAS
LCDR3:
(SEQ ID NO: 239)
QQYNIWPRT
69329
HCVR (V_{H}) Nucleotide Sequence
(SEQ ID NO: 240)
GAGGTGCAGCTGGTGGAGTCTGGGGGAGGCTTGGTCCAGCCTGGGGGGTCCCTGAGACTCTCCTGTGCAGCCTCTGG
ATTCACCTTTAGTAACTATTGGATGACCTGGGTCCGCCAGGCTCCAGGGAAGGGGCTGGAGTGGGTGGCCAACATAA
AGGAAGATGGAAGTGAGAAAGACTATGTGGACTCTGTGAAGGGCCGATTCACCATCTCCAGAGACAACGCCAAGAAC
TCACTGTATCTGCAAATGAACAGCCTGAGAGGCGAGGACACGGCTGTGTATTACTGTGCGAGAGATGGGGAGCAGCT
CGTCGATTACTACTACTACTACGTTATGGACGTCTGGGGCCAAGGGACCACGGTCACCGTCTCCTCA
HCVR (V_{H}) Amino Acid Sequence
(SEQ ID NO: 241)
EVQLVESGGGLVQPGGSLRLSCAASGFTFSNYWMTWVRQAPGKGLEWVANIKEDGSEKDYVDSVKGRFTISRDNAKN
SLYLQMNSLRGEDTAVYYCARDGEQLVDYYYYYVMDVWGQGTTVTVSS
or
(SEQ ID NO: 689)
QVQLVESGGGLVQPGGSLRLSCAASGFTFSNYWMTWVRQAPGKGLEWVANIKEDGSEKDYVDSVKGRFTISRDNAKN
SLYLQMNSLRGEDTAVYYCARDGEQLVDYYYYYVMDVWGQGTTVTVSS
HCDR1:
(SEQ ID NO: 242)
GFTFSNYW
HCDR2:
(SEQ ID NO: 243)
IKEDGSEK
HCDR3:
(SEQ ID NO: 244)
ARDGEQLVDYYYYYVMDV
LCVR (V_{L}) Nucleotide Sequence
(SEQ ID NO: 245)
GACATCCAGATGACCCAGTCTCCATCTTCCGTGTCTGCATCTGTAGGAGACAGAGTCACCATCACTTGTCGGGCGAG
TCAGGGTATTAGCAGCTGGTTAGCCTGGTATCAGCAGAAACCAGGGAAAGCCCCTAAGCTCCTGATCTATGCTGCAT
CCAGTTTGCAAAGTGGGGTCCCATCAAGGTTCAGCGGCAGTGGATCTGGGACAGATTTCACTCTCACCATCAGCAGC
CTGCAGCCTGAAGATTTTGCAACTTACTATTGTCAAAAGGCTAACAGTTTCCCGTACACTTTTGGCCAGGGGACCAA
GCTGGAGATCAAA
LCVR (V_{L}) Amino Acid Sequence
(SEQ ID NO: 246)
DIQMTQSPSSVSASVGDRVTITCRASQGISSWLAWYQQKPGKAPKLLIYAASSLQSGVPSRFSGSGSGTDFTLTISS
LQPEDFATYYCQKANSFPYTFGQGTKLEIK
or
(SEQ ID NO: 690)
DIQMTQSPSSVSASVGDRVTITCRASQGISSWLAWYQQKPGKAPKLLIYAASSLQSGVPSRFSGSGSGTDFTLTISS
LQPEDFATYYCQKANSFPYTFGQGTKVEIK
LCDR1:
(SEQ ID NO: 247)
QGISSW
LCDR2:
(SEQ ID NO: 248)
AAS
LCDR3:
(SEQ ID NO: 249)
QKANSFPYT
69323 (REGN16816 anti-hTfR scFv:hGAA)
HCVR (V_{H}) Nucleotide Sequence
(SEQ ID NO: 250)
GAAGTGCAGCTGGTGGAGTCTGGGGGAGGCTTGGTACAGCCTGGCAGGTCCCTGAGACTCTCCTGTGCAGCCTCTGG
ATTCACCTTTGATGACTATGCCATGCACTGGGTCCGGCAAGCTCCAGGGAAGGGCCTGGAGTGGGTCTCAGGTATTA
GTTGGAATAGTGGTTACATAGGCTATGCGGACTCTGTGAAGGGCCGATTCACCATCTCCAGAGACAACGCCGAGAAC
TCCCTACATCTGCAAATGAACAGTCTGAGAGCTGAGGACACGGCCTTGTATTACTGTGCAAGAGGGGGATCTACTCT
GGTTCGGGGAGTTAAGGGAGGCTACTACGGTATGGACGTCTGGGGCCAAGGGACCACGGTCACCGTCTCCTCA
HCVR (V_{H}) Amino Acid Sequence
(SEQ ID NO: 251)
EVQLVESGGGLVQPGRSLRLSCAASGFTFDDYAMHWVRQAPGKGLEWVSGISWNSGYIGYADSVKGRFTISRDNAEN
SLHLQMNSLRAEDTALYYCARGGSTLVRGVKGGYYGMDVWGQGTTVTVSS
HCDR1:
(SEQ ID NO: 252)
GFTFDDYA
HCDR2:
(SEQ ID NO: 253)
ISWNSGYI
HCDR3:
(SEQ ID NO: 254)
ARGGSTLVRGVKGGYYGMDV
LCVR (V_{L}) Nucleotide Sequence
(SEQ ID NO: 255)
GACATCCAGATGACCCAGTCTCCATCCTCCCTGTCTGCATCTGTAGGAGACAGAGTCACCATCACTTGCCGGGCAAG
TCAGAGCATAAGTAGCTATTTAAATTGGTATCAGCAGAAACCAGGTAAAGCCCCTAAGGTCCTGATCTATGCTGCAT
CCAGTTTGCAAAGTGGGGTCCCATCAAGGTTCAGTGGCAGTGGATCTGGGACAGATTTCACTCTCACCATCAGCAGT
CTGCAACCTGAAGATTTTGCAACTTACTACTGTCAACAGAGTTACAGTATTCCGCTCACTTTCGGCGGAGGGACCAA
GGTGGAGATCAAA
LCVR (V_{L}) Amino Acid Sequence
(SEQ ID NO: 256)
DIQMTQSPSSLSASVGDRVTITCRASQSISSYLNWYQQKPGKAPKVLIYAASSLQSGVPSRFSGSGSGTDFTLTISS
LQPEDFATYYCQQSYSIPLTFGGGTKVEIK
LCDR1:
(SEQ ID NO: 257)
QSISSY
LCDR2:
(SEQ ID NO: 258)
AAS
LCDR3:
(SEQ ID NO: 259)
QQSYSIPLT
69305
HCVR (V_{H}) Nucleotide Sequence
(SEQ ID NO: 260)
CAGGTGCAGCTGGTGGAGTCTGGGGGAGGCGTGGTCCAGCCTGGGAGGTCCCTGAGACTCTCCTGTGCAGCGTCTGG
ATTCACCTTCAGTAGCTATGGCATGCACTGGGTCCGCCAGGCTCCAGGCAAGGGGCTGGAGTGGGTGGCAGTTATAT
GGTATGATGGAAGTAATAAATACTATGCAGACTCCGTGAAGGGCCGATTCACCATCTCCAGAGACATTTCCAAGAAC
ACGCTGTATCTGCAAATGAACAGCCTGAGAGCCGAGGACACGGCCGTATATTACTGTGCGGGTCAACTGGATCTCTT
CTTTGACTACTGGGGCCAGGGAACCCTGGTCACCGTCTCCTCA
HCVR (V_{H}) Amino Acid Sequence
(SEQ ID NO: 261)
QVQLVESGGGVVQPGRSLRLSCAASGFTFSSYGMHWVRQAPGKGLEWVAVIWYDGSNKYYADSVKGRFTISRDISKN
TLYLQMNSLRAEDTAVYYCAGQLDLFFDYWGQGTLVTVSS
or
(SEQ ID NO: 691)
EVQLVESGGGVVQPGRSLRLSCAASGFTFSSYGMHWVRQAPGKGLEWVAVIWYDGSNKYYADSVKGRFTISRDISKN
TLYLQMNSLRAEDTAVYYCAGQLDLFFDYWGQGTLVTVSS
HCDR1:
(SEQ ID NO: 262)
GFTFSSYG
HCDR2:
(SEQ ID NO: 263)
IWYDGSNK
HCDR3:
(SEQ ID NO: 264)
AGQLDLFFDY
LCVR (V_{L}) Nucleotide Sequence
(SEQ ID NO: 265)
GACATCCAGATGACCCAGTCTCCATCCTCCCTGTCTGCATCTGTAGGAGACAGAGTCACCATCACTTGCCGGGCAAG
TCAGAGCATTGACAGGTATTTAAATTGGTATCGGCAGAAACCAGGGAAAGCCCCTAAGCTCCTGATCTATACTACAT
CCAGTTTGCAAAGTGGGGTCCCATCAAGGTTCAGTGGCAGTGGATCTGGGACAGATTTCACTCTCACCCTCAGCAGT
CTGCAGCCTGAAGATTTTGCAACTTACTACTGTCAGCAGAGTTACAGTCCCCCGCTCACTTTCGGCGGAGGGACCAA
GGTGGAGATCAAA
LCVR (V_{L}) Amino Acid Sequence
(SEQ ID NO: 266)
DIQMTQSPSSLSASVGDRVTITCRASQSIDRYLNWYRQKPGKAPKLLIYTTSSLQSGVPSRFSGSGSGTDFTLTLSS
LQPEDFATYYCQQSYSPPLTFGGGTKVEIK
LCDR1:
(SEQ ID NO: 267)
QSIDRY
LCDR2:
(SEQ ID NO: 268)
TTS
LCDR3:
(SEQ ID NO: 269)
QQSYSPPLT
69307 (REGN16817 anti-hTfR scFv:hGAA)
HCVR (V_{H}) Nucleotide Sequence
(SEQ ID NO: 270)
GAGGTGCAGCTGGTGGAGTCTGGGGGAGGCTTGGTCCAGCCTGGGGGGTCCCTGAGACTCTCCTGTACAGCCTCTGG
ATTCACCTTTAGTAACTATTGGATGACCTGGGTCCGCCAGGCTCCAGGGAAGGGGCTGGAGTGGGTGGCCAACATAA
AGGAAGATGGAAGTGAGAAAGAGTATGTGGACTCTGTGAAGGGCCGGTTCACCATCTCCAGAGACAACGCCAAGAAT
TCACTGTATCTGCAAATGAACAGCCTGAGAGGCGAGGACACGGCTGTATATTACTGTGCGAGAGATGGGGAGCAGCT
CGTCGATTACTATTACTACTACGTTATGGACGTCTGGGGCCAAGGGACCACGGTCACCGTCTCCTCA
HCVR (V_{H}) Amino Acid Sequence
(SEQ ID NO: 271)
EVQLVESGGGLVQPGGSLRLSCTASGFTFSNYWMTWVRQAPGKGLEWVANIKEDGSEKEYVDSVKGRFTISRDNAKN
SLYLQMNSLRGEDTAVYYCARDGEQLVDYYYYYVMDVWGQGTTVTVSS
HCDR1:
(SEQ ID NO: 272)
GFTFSNYW
HCDR2:
(SEQ ID NO: 273)
IKEDGSEK
HCDR3:
(SEQ ID NO: 274)
ARDGEQLVDYYYYYVMDV
LCVR (V_{L}) Nucleotide Sequence
(SEQ ID NO: 275)
GACATCCAGATGACCCAGTCTCCATCTTCCGTGTCTGCATCTGTTGGAGACAGAGTCACCATCACTTGTCGGGCGAG
TCAGGGTATTAGCAGCTGGTTAGCCTGGTATCAGCAGAAACCAGGGAAAGCCCCTAAGCTCCTGATCTATGCTGCAT
CCAGTTTGCAAAGTGGGGTCCCATCAAGGTTCAGCGGCAGTGGATCTGGGACAGATTTCACTCTCACCATCAGCAGC
CTGCAGCCTGAAGATTTTGCAACTTACTATTGTCAAAAGGCTGACAGTCTCCCGTACGCTTTTGGCCAGGGGACCAA
GCTGGAGATCAAA
LCVR (V_{L}) Amino Acid Sequence
(SEQ ID NO: 276)
DIQMTQSPSSVSASVGDRVTITCRASQGISSWLAWYQQKPGKAPKLLIYAASSLQSGVPSRFSGSGSGTDFTLTISS
LQPEDFATYYCQKADSLPYAFGQGTKLEIK
LCDR1:
(SEQ ID NO: 277)
QGISSW
LCDR2:
(SEQ ID NO: 278)
AAS
LCDR3:
(SEQ ID NO: 279)
QKADSLPYA
12795B
HCVR (V_{H}) Nucleotide Sequence
(SEQ ID NO: 280)
GAGGTGCAGCTGGTGGAGTCTGGGGGAGGCTTGGTTCAGCCTGGGGGGTCCCTGAGACTCTCCTGTGCAACCTCTGG
ATTCACCTTTACCAGCTATGACATGAAGTGGGTCCGCCAGGCTCCAGGGCTGGGCCTGGAGTGGGTCTCAGCTATTA
GTGGTAGTGGTGGTAACACATACTACGCAGACTCCGTGAAGGGCCGGTTCACCATCTCCAGAGACAATTCCAGGAAC
ACGCTGTATCTGCAAATGAACAGCCTGAGAGCCGAGGACACGGCCGTATATTACTGTACGAGGTCCCATGACTTCGG
TGCCTTCGACTACTTTGACTACTGGGGCCAGGGAACCCTGGTCACCGTCTCCTCA
HCVR (V_{H}) Amino Acid Sequence
(SEQ ID NO: 281)
EVQLVESGGGLVQPGGSLRLSCATSGFTFTSYDMKWVRQAPGLGLEWVSAISGSGGNTYYADSVKGRFTISRDNSRN
TLYLQMNSLRAEDTAVYYCTRSHDFGAFDYFDYWGQGTLVTVSS
or
(SEQ ID NO: 692)
EVQLVQSGGGLVQPGGSLRLSCATSGFTFTSYDMKWVRQAPGLGLEWVSAISGSGGNTYYADSVKGRFTISRDNSRN
TLYLQMNSLRAEDTAVYYCTRSHDFGAFDYFDYWGQGTMVTVSS
HCDR1:
(SEQ ID NO: 282)
GFTFTSYD
HCDR2:
(SEQ ID NO: 283)
ISGSGGNT
HCDR3:
(SEQ ID NO: 284)
TRSHDFGAFDYFDY
LCVR (V_{L}) Nucleotide Sequence
(SEQ ID NO: 285)
GACATCCAGATGACCCAGTCTCCATCCTCCCTGTCTGCATCTGTGGGAGACAGAGTCACCATCACTTGCCGGGCAAG
TCAGGGCATTAGAGATCATTTTGGCTGGTATCAGCAGAAACCAGGGAAAGCCCCTAAGCGCCTGATCTATGCTGCAT
CCAGTTTGCACAGTGGGGTCCCATCAAGGTTCAGCGGCAGTGGATCTGGGACAGAATTCACTCTCACAATCAGCAGC
TTGCAGCCTGAAGATTTTGCAACCTATTACTGTCTACAGTATGATACTTACCCGCTCACTTTCGGCGGAGGGACCAA
GGTGGAGATCAAA
LCVR (V_{L}) Amino Acid Sequence
(SEQ ID NO: 286)
DIQMTQSPSSLSASVGDRVTITCRASQGIRDHFGWYQQKPGKAPKRLIYAASSLHSGVPSRFSGSGSGTEFTLTISS
LQPEDFATYYCLQYDTYPLTFGGGTKVEIK
or
(SEQ ID NO: 693)
DIQLTQSPSSLSASVGDRVTITCRASQGIRDHFGWYQQKPGKAPKRLIYAASSLHSGVPSRFSGSGSGTEFTLTISS
LQPEDFATYYCLQYDTYPLTFGGGTKVEIK
LCDR1:
(SEQ ID NO: 287)
QGIRDH
LCDR2:
(SEQ ID NO: 288)
AAS
LCDR3:
(SEQ ID NO: 289)
LQYDTYPLT
12798B (REGN17078 Fab; REGN17072 scFv; REGN16818 anti-hTfR scFv:hGAA)
HCVR (V_{H}) Nucleotide Sequence
(SEQ ID NO: 290)
GAAGTGCAGCTGGTGGAGTCTGGGGGAGACTTGGTACAGCCTGGCAGGTCCCTGAGACTCTCCTGTGCAGCCTCTGG
ATTCACCTTTGATGATTATGCCATGCACTGGGTCCGGCAAGCTCCAGGGAAGGGCCTGGAGTGGGTCTCAGGTATTA
GTTGGAATAGTGCTACCAGAGTCTATGCGGACTCTGTGAAGGGCCGATTCACCATCTCCAGAGACAACGCCAAGAAT
TTCCTGTATCTGCAAATGAACAGTCTGAGATCTGAGGACACGGCCTTGTATCACTGTGCAAAAGATATGGATATCTC
GCTAGGGTACTACGGTTTGGACGTCTGGGGCCAAGGGACCACGGTCACCGTCTCCTCA
HCVR (V_{H}) Amino Acid Sequence
(SEQ ID NO: 291)
EVQLVESGGDLVQPGRSLRLSCAASGFTFDDYAMHWVRQAPGKGLEWVSGISWNSATRVYADSVKGRFTISRDNAKN
FLYLQMNSLRSEDTALYHCAKDMDISLGYYGLDVWGQGTTVTVSS
HCDR1:
(SEQ ID NO: 292)
GFTFDDYA
HCDR2:
(SEQ ID NO: 293)
ISWNSATR
HCDR3:
(SEQ ID NO: 294)
AKDMDISLGYYGLDV
LCVR (V_{L}) Nucleotide Sequence
(SEQ ID NO: 295)
GAAATAGTGATGACGCAGTCTCCAGCCACCCTGTCTGTGTCTCCAGGGGAAAGAGCCACCCTCTCCTGCAGGGCCAG
TCAGACTGTTAGCAGCAACTTAGCCTGGTATCAGCAGAAACCTGGCCAGGCTCCCAGGCTCCTCATCTATGGTTCAT
CCTCCAGGGCCACTGGTATCCCAGCCAGGTTCAGTGGCAGTGGGTCTGGGACAGAGTTCACTCTCACCATCAGCAGC
CTGCAGTCTGAAGATTTTGCAGTTTATTACTGTCAGCAGTATAATAACTGGCCTCCCTACACTTTTGGCCAGGGGAC
CAAGCTGGAGATCAAA
LCVR (V_{L}) Amino Acid Sequence
(SEQ ID NO: 296)
EIVMTQSPATLSVSPGERATLSCRASQTVSSNLAWYQQKPGQAPRLLIYGSSSRATGIPARFSGSGSGTEFTLTISS
LQSEDFAVYYCQQYNNWPPYTFGQGTKLEIK
LCDR1:
(SEQ ID NO: 297)
QTVSSN
LCDR2:
(SEQ ID NO: 298)
GSS
LCDR3:
(SEQ ID NO: 299)
QQYNNWPPYT
12799B (REGN17079 Fab; REGN17073 scFv; REGN16819 anti-hTfR scFv:hGAA)
HCVR (V_{H}) Nucleotide Sequence
(SEQ ID NO: 300)
CAGATCACCTTGAAGGAGTCTGGTCCTACGCTGGTGAAACCCACACAGACCCTCACGCTGACCTGCACCTTCTCTGG
GTTCTCACTCAGCACTAGTGGAGTGGGTGTGGTCTGGATCCGTCAGCCCCCCGGAAAGGCCCTGGAGTGGCTTGCAC
TCATTTATTGGAATGATCATAAGCGGTACAGCCCATCTCTGGGGAGCAGGCTCACCATCACCAAGGACACCTCCAAA
AACCAGGTGGTCCTTACAATGACCAACATGGACCCTGTGGACACAGCCACATATTACTGTGCACACTACAGTGGGAG
CTATTCCTACTACTACTATGGTTTGGACGTCTGGGGCCAAGGGACCACGGTCACCGTCTCCTCA
HCVR (V_{H}) Amino Acid Sequence
(SEQ ID NO: 301)
QITLKESGPTLVKPTQTLTLTCTFSGFSLSTSGVGVVWIRQPPGKALEWLALIYWNDHKRYSPSLGSRLTITKDTSK
NQVVLTMTNMDPVDTATYYCAHYSGSYSYYYYGLDVWGQGTTVTVSS
HCDR1:
(SEQ ID NO: 302)
GFSLSTSGVG
HCDR2:
(SEQ ID NO: 303)
IYWNDHK
HCDR3:
(SEQ ID NO: 304)
AHYSGSYSYYYYGLDV
LCVR (V_{L}) Nucleotide Sequence
(SEQ ID NO: 305)
GACATCCAGATGACCCAGTCTCCATCTTCCGTGTCTGCATCTGTAGGAGACAGAGTCACCATCACTTGTCGGGCGAG
TCAGGGTATTGCCAGCTGGTTAGCCTGGTATCAGCAGAAACCAGGGAAAGCCCCTGAGCTCCTGATCTATGCTGCAT
CCAGTTTGCAAGGTGGGGTCCCATCAAGGTTCAGCGGCAGTGGATCTGGGACAGATTTCACTCTCACCATCAGCAGC
CTGCAGCCTGAAGATTTTGCAATTTACTATTGTCAACAGGCTAACTATTTCCCGTGGACGTTCGGCCAAGGGACCAA
GGTGGAAATCAAA
LCVR (V_{L}) Amino Acid Sequence
(SEQ ID NO: 306)
DIQMTQSPSSVSASVGDRVTITCRASQGIASWLAWYQQKPGKAPELLIYAASSLQGGVPSRFSGSGSGTDFTLTISS
LQPEDFAIYYCQQANYFPWTFGQGTKVEIK
LCDR1:
(SEQ ID NO: 307)
QGIASW
LCDR2:
(SEQ ID NO: 308)
AAS
LCDR3:
(SEQ ID NO: 309)
QQANYFPWT
12801B
HCVR (V_{H}) Nucleotide Sequence
(SEQ ID NO: 310)
GAGGTGCAGCTGTTGGAGTCTGGGGGAGCCTTGGTACAGCCTGGGGGGTCCCTGAGACTCTCCTGTGCAGCCTCTGG
ATTCACCTTTACCTCCTATGCCATGCACTGGGTCCGCCAGGCTCCAGGGAAGGGTCTGGAGTGGGTCTCATCTATTA
GAGGTAGTGGTGGTGGCACATACTCCGCAGACTCCGTGAAGGGCCGGTTCACCATCTCCAGAGACAATTCCAGGGAC
ACTCTATATCTGCAAATGAACAGTGTGAGAGCCGAGGACACGGCCGTTTATTACTGTGCGAGGTCCCATGACTACGG
TGCCTTCGACTTCTTTGACTACTGGGGCCAGGGAACCCTGGTCACCGTCTCCTCA
HCVR (V_{H}) Amino Acid Sequence
(SEQ ID NO: 311)
EVQLLESGGALVQPGGSLRLSCAASGFTFTSYAMHWVRQAPGKGLEWVSSIRGSGGGTYSADSVKGRFTISRDNSRD
TLYLQMNSVRAEDTAVYYCARSHDYGAFDFFDYWGQGTLVTVSS
or
(SEQ ID NO: 694)
EVQLLESGGALVQPGGSLRLSCAASGFTFTSYAMHWVRQAPGKGLEWVSSIRGSGGGTYSADSVKGRFTISRDNSRD
TLYLQMNSVRAEDTAVYYCARSHDYGAFDFFDYWGQGTTVTVSS
HCDR1:
(SEQ ID NO: 312)
GFTFTSYA
HCDR2:
(SEQ ID NO: 313)
IRGSGGGT
HCDR3:
(SEQ ID NO: 314)
ARSHDYGAFDFFDY
LCVR (V_{L}) Nucleotide Sequence
(SEQ ID NO: 315)
GACATCCAGATGACCCAGTCTCCATCCTCCCTGTCTGCATCTGTAGGAGACAGAGTCACCATCACTTGCCGGGCAAG
TCAGGGCATTAGAACTGATTTAGGCTGGTATCAGCAGAAACCAGGGAAAGCCCCTAAGCGCCTGATCTATGCTGCAT
CCAGTTTGCAAAGTGGGGTCCCATCAAGGTTCAGCGGCAGTGGATCTGGGACAGAATTCACTCTCACAATCAGCAGC
CTGCGGCCTGAAGATTTTGCAACTTTTTACTGTCTACAGTATAATAGTTACCCGCTCACTTTCGGCGGAGGGACCAA
GGTGGAGATCAAA
LCVR (V_{L}) Amino Acid Sequence
(SEQ ID NO: 316)
DIQMTQSPSSLSASVGDRVTITCRASQGIRTDLGWYQQKPGKAPKRLIYAASSLQSGVPSRFSGSGSGTEFTLTISS
LRPEDFATFYCLQYNSYPLTFGGGTKVEIK
or
(SEQ ID NO: 695)
DIQMTQSPSSLSASVGDRVTITCRASQGIRTDLGWYQQKPGKAPKRLIYAASSLQSGVPSRFSGSGSGTEFTLTISS
LRPEDFATFYCLQYNSYPLTFGGGTKVDIK
LCDR1:
(SEQ ID NO: 317)
QGIRTD
LCDR2:
(SEQ ID NO: 318)
AAS
LCDR3:
(SEQ ID NO: 319)
LQYNSYPLT
12802B (REGN16820 anti-hTfR scFv:hGAA)
HCVR (V_{H}) Nucleotide Sequence
(SEQ ID NO: 320)
CAGGTGCAGCTGGTGGAGTCTGGGGGAGGCTTGGTCAAGCCTGGAGGGTCCCTGAGACTCTCCTGTGCAGCCTCTGG
ATTCACCTTCAGTGACTACTTCATGAGCTGGATCCGCCAGGCTCCAGGGAAGGGGCTGGAGTGGGTTTCATACATTA
GTAGTACTGGTAGTACCATAAATTATGCAGACTCTGTGAAGGGCCGATTCACCATCTCCAGGGACAATGTCAAGAAT
TCACTGTATCTGCAAATGACCAGCCTGAGAGTCGAGGACACGGCCGTGTATTACTGTACGAGAGATAACTGGAACTA
TGAATACTGGGGCCAGGGAACCCTGGTCACCGTCTCCTCA
HCVR (V_{H}) Amino Acid Sequence
(SEQ ID NO: 321)
QVQLVESGGGLVKPGGSLRLSCAASGFTFSDYFMSWIRQAPGKGLEWVSYISSTGSTINYADSVKGRFTISRDNVKN
SLYLQMTSLRVEDTAVYYCTRDNWNYEYWGQGTLVTVSS
HCDR1:
(SEQ ID NO: 322)
GFTFSDYF
HCDR2:
(SEQ ID NO: 323)
ISSTGSTI
HCDR3:
(SEQ ID NO: 324)
TRDNWNYEY
LCVR (V_{L}) Nucleotide Sequence
(SEQ ID NO: 325)
GAAATAGTGATGACGCAGTCTCCAGCCACCCTGTCTGTGTCTCCAGGGGAAAGAGCCACCCTCTCCTGCAGGGCCAG
TCAGAGTGTTAGCATCAACTTAGCCTGGTACCAGCAGAAACCTGGCCAGGCTCCCAGGCTCCTCATCTTTGTTGCAT
CCACCAGGGCCACTGGTATCCCAGCCAGGTTCAGTGGCAGTGGGTCTGGGACAGAGTTCACTCTCACCATCAGCAGC
CTGCAGTCTGAAGATTTTGCAACTTATTACTGTCAGCAGTATGATATCTGGCCGTACACTTTTGGCCAGGGGACCAA
GCTGGAGATCAAA
LCVR (V_{L}) Amino Acid Sequence
(SEQ ID NO: 326)
EIVMTQSPATLSVSPGERATLSCRASQSVSINLAWYQQKPGQAPRLLIFVASTRATGIPARFSGSGSGTEFTLTISS
LQSEDFATYYCQQYDIWPYTFGQGTKLEIK
LCDR1:
(SEQ ID NO: 327)
QSVSIN
LCDR2:
(SEQ ID NO: 328)
VAS
LCDR3:
(SEQ ID NO: 329)
QQYDIWPYT
12808B
HCVR (V_{H}) Nucleotide Sequence
(SEQ ID NO: 330)
CAGCTGCAGCTGCAGGAGTCGGGCCCAGGACTGGTGAAGCCTTCGGAGACCCTGTCCCTCACCTGCACTGTGTCTGG
TGAATCCATCAGCAGTAATACTTACTACTGGGGCTGGATCCGCCAGCCCCCAGGGAAGGGGCTGGAATGGATTGGGA
GTATCGATTATAGTGGGACCACCAATTATAACCCGTCCCTCAAGAGTCGAGTCACCATATCCGTAGACACGTCCAGG
AATCACTTCTCCCTGAGGCTGAGGTCTGTGACCGCCGCAGACACGGCTGTGTATTACTGTGCGAGAGAGTGGGGAAA
CTACGGCTACTATTACGGTATGGACGTTTGGGGCCAAGGGACCACGGTCACCGTCTCCTCA
HCVR (V_{H}) Amino Acid Sequence
(SEQ ID NO: 331)
QLQLQESGPGLVKPSETLSLTCTVSGESISSNTYYWGWIRQPPGKGLEWIGSIDYSGTTNYNPSLKSRVTISVDTSR
NHFSLRLRSVTAADTAVYYCAREWGNYGYYYGMDVWGQGTTVTVSS
or
(SEQ ID NO: 696)
QVQLVESGPGLVKPSETLSLTCTVSGESISSNTYYWGWIRQPPGKGLEWIGSIDYSGTTNYNPSLKSRVTISVDTSR
NHFSLRLRSVTAADTAVYYCAREWGNYGYYYGMDVWGQGTTVTVSS
HCDR1:
(SEQ ID NO: 332)
GESISSNTYY
HCDR2:
(SEQ ID NO: 333)
IDYSGTT
HCDR3:
(SEQ ID NO: 334)
AREWGNYGYYYGMDV
LCVR (V_{L}) Nucleotide Sequence
(SEQ ID NO: 335)
GACATCCAGATGACCCAGTCTCCATCCTCCCTGTCTGCATCTGTAGGAGACAGAGTCACCATCAATTGCCGGGCAAG
TCAGGGCATTAGAAATGATTTAGGCTGGTATCAGCAGAAACCAGGGAAAGCCCCTAAGCGCCTGATCTATGCTGCAT
CCAGTTTGCAAAGTGGGGTCCCATTAAGGTTCAGTGGCAGTGGATCTGGGACAGAATTCACTCTCACAATCAACAAC
CTGCAGCCTGAAGATTTTGCAACTTATTACTGTCTATCGCATAATAGTTACCCGTGGACGTTCGGCCAAGGGACCAA
GGTGGAAATCAAA
LCVR (V_{L}) Amino Acid Sequence
(SEQ ID NO: 336)
DIQMTQSPSSLSASVGDRVTINCRASQGIRNDLGWYQQKPGKAPKRLIYAASSLQSGVPLRFSGSGSGTEFTLTINN
LQPEDFATYYCLSHNSYPWTFGQGTKVEIK
LCDR1:
(SEQ ID NO: 337)
QGIRND
LCDR2:
(SEQ ID NO: 338)
AAS
LCDR3:
(SEQ ID NO: 339)
LSHNSYPWT
12812B (REGN16821 anti-hTfR scFv:hGAA)
HCVR (V_{H}) Nucleotide Sequence
(SEQ ID NO: 340)
CAGGTGCAGCTGGTGCAGTCTGGGGCTGAGGTGAAGAAGCCTGGGTCCTCGGTGAGGGTCTCCTGCAAGGCTTCTAG
AGGCACCTTCAGCAGCTATGCTATCAGCTGGGTGCGACAGGCCCCTGGACAAGGCCTTGAGTGGATGGGAGGGATCA
TCCCCATCTTTGGTACAGCAAACTACGCACAGAAGTTCCTGGCCAGAGTCACGATTACCGCGGACGAATCCACGAGC
ACAGCCTACATGGAGCTGAGCAGCCTGAGATCTGAGGACACGGCCGTGTATTACTGTGCGAGAGAGAAGGGGTGGAA
CTACTTTGACTACTGGGGCCAGGGAACCCTGGTCACCGTCTCCTCA
HCVR (V_{H}) Amino Acid Sequence
(SEQ ID NO: 341)
QVQLVQSGAEVKKPGSSVRVSCKASRGTESSYAISWVRQAPGQGLEWMGGIIPIFGTANYAQKFLARVTITADESTS
TAYMELSSLRSEDTAVYYCAREKGWNYFDYWGQGTLVTVSS
HCDR1:
(SEQ ID NO: 342)
RGTFSSYA
HCDR2:
(SEQ ID NO: 343)
IIPIFGTA
HCDR3:
(SEQ ID NO: 344)
AREKGWNYFDY
LCVR (V_{L}) Nucleotide Sequence
(SEQ ID NO: 345)
GACATCCAGATGACCCAGTCTCCACCTTCCGTGTCTGCATCTGTAGGAGACAGAGTCACCATCACTTGTCGGGCGAG
TCAGGGTATTAGCAGCTGGTTAGCCTGGTATCAGCAGAAACCAGGGAAAGCCCCTAAACTCCTGATCTATGCTGCAT
CCAGTTTGCAAAGTGGGGTCCCATCAAGGTTCAGCGGCAGTGGATCTGGGACAGATTTCACTCTCACCATCAGCAGC
CTGCAGCCTGAAGATTTTGCAACTTACTATTGTCAACAGGCTAACAGTTTCCCTCGGACGTTCGGCCAAGGGACCAA
GGTGGAAATCAAA
LCVR (V_{L}) Amino Acid Sequence
(SEQ ID NO: 346)
DIQMTQSPPSVSASVGDRVTITCRASQGISSWLAWYQQKPGKAPKLLIYAASSLQSGVPSRFSGSGSGTDFTLTISS
LQPEDFATYYCQQANSFPRTFGQGTKVEIK
LCDR1:
(SEQ ID NO: 347)
QGISSW
LCDR2:
(SEQ ID NO: 348)
AAS
LCDR3:
(SEQ ID NO: 349)
QQANSFPRT
12816B
HCVR (V_{H}) Nucleotide Sequence
(SEQ ID NO: 350)
CAGGTGCAGCTGGTGGAGTCTGGGGGAGGCTTGGTCAAGCCTGGAGGGTCCCTGAGACTCTCCTGTGCAGCCTCTGG
ATTCACCTTCAGTGACTACTACATGAACTGGATCCGCCAGGCTCCAGGGAAGGGGCTGGAGTGGGTTTCATACATTA
GTAGTAGTGGGACTACCATATACTACGCAGACTCTGTGAAGGGCCGATTCACCATCTCCAGGGACAACGCCAAGAAA
TCACTGTATCTGGAGATGAACAGCCTCAGAGCCGAGGACACGGCCGTGTACTACTGTGCGAGAGAGGGGTACGGTAA
TGACTACTATTACTACGGTATAGACGTCTGGGGCCAAGGGACCACGGTCACCGTCTCCTCA
HCVR (V_{H}) Amino Acid Sequence
(SEQ ID NO: 351)
QVQLVESGGGLVKPGGSLRLSCAASGFTFSDYYMNWIRQAPGKGLEWVSYISSSGTTIYYADSVKGRFTISRDNAKK
SLYLEMNSLRAEDTAVYYCAREGYGNDYYYYGIDVWGQGTTVTVSS
or
(SEQ ID NO: 697)
EVQLVESGGGLVKPGGSLRLSCAASGFTFSDYYMNWIRQAPGKGLEWVSYISSSGTTIYYADSVKGRFTISRDNAKK
SLYLEMNSLRAEDTAVYYCAREGYGNDYYYYGIDVWGQGTTVTVSS
HCDR1:
(SEQ ID NO: 352)
GFTFSDYY
HCDR2:
(SEQ ID NO: 353)
ISSSGTTI
HCDR3:
(SEQ ID NO: 354)
AREGYGNDYYYYGIDV
LCVR (V_{L}) Nucleotide Sequence
(SEQ ID NO: 355)
GATATTGTGATGACTCAGTCTCCACTCTCCCTGCCCGTCACCCCTGGAGAGCCGGCCTCCATCTCCTGCAGGTCTAG
TCAGAGCCTCCTGCATGGTAATGGATACAACTATTTGACTTGGTACCTGCAGAAGCCAGGGCAGTCTCCACAGCTCC
TGATCTATTTGGGTTCTAATCGGGCCTCCGGGGTCCCTGACAGGTTCAGTGGCAGTGGATCAGGCACAGATTTTACA
CTGAAAATAAGCAGAGTGGAGGCTGAGGATGTTGGGGTTTATTACTGCATGCAAGCTCTACAAACTCCGTACACTTT
TGGCCAGGGGACCAAGCTGGAGATCAAA
LCVR (V_{L}) Amino Acid Sequence
(SEQ ID NO: 356)
DIVMTQSPLSLPVTPGEPASISCRSSQSLLHGNGYNYLTWYLQKPGQSPQLLIYLGSNRASGVPDRFSGSGSGTDFT
LKISRVEAEDVGVYYCMQALQTPYTFGQGTKLEIK
or
(SEQ ID NO: 698)
DIQLTQSPLSLPVTPGEPASISCRSSQSLLHGNGYNYLTWYLQKPGQSPQLLIYLGSNRASGVPDRFSGSGSGTDFT
LKISRVEAEDVGVYYCMQALQTPYTFGQGTKVEIK
LCDR1:
(SEQ ID NO: 357)
QSLLHGNGYNY
LCDR2:
(SEQ ID NO: 358)
LGS
LCDR3:
(SEQ ID NO: 359)
MQALQTPYT
12833B
HCVR (V_{H}) Nucleotide Sequence
(SEQ ID NO: 360)
CAGGTGCAGCTGGTGGAGTCTGGGGGAGGCGTGGTCCAGCCTGGGAGGTCCCTGAGACTCTCCTGTGCAGCCTCTGG
ATTCACCTTCAGTAGCTTTGGCATGCACTGGGTCCGCCAGGCTCCAGGCAAGGGGCTGGAGTGGGTGATATTTATAT
CATATGATGGAAGTGATAAATACTATGCAGACTCCGTGAAGGGCCGATTCGCCATCTCCAGAGACAGTTCCAAGAAC
ACGCTATATCTGCAAATGAACAGCCTGAGAGCTGAGGACACGGCTGTGTATTACTGTGCGAAAGAAAACGGTATTTT
GACTGATTCCTACGGTATGGACGTCTGGGGCCAAGGGACCACGGTCACCGTCTCCTCA
HCVR (V_{H}) Amino Acid Sequence
(SEQ ID NO: 361)
QVQLVESGGGVVQPGRSLRLSCAASGFTFSSFGMHWVRQAPGKGLEWVIFISYDGSDKYYADSVKGRFAISRDSSKN
TLYLQMNSLRAEDTAVYYCAKENGILTDSYGMDVWGQGTTVTVSS
or
(SEQ ID NO: 699)
EVQLVESGGGVVQPGRSLRLSCAASGFTFSSFGMHWVRQAPGKGLEWVIFISYDGSDKYYADSVKGRFAISRDSSKN
TLYLQMNSLRAEDTAVYYCAKENGILTDSYGMDVWGQGTTVTVSS
HCDR1:
(SEQ ID NO: 362)
GFTFSSFG
HCDR2:
(SEQ ID NO: 363)
ISYDGSDK
HCDR3:
(SEQ ID NO: 364)
AKENGILTDSYGMDV
LCVR (V_{L}) Nucleotide Sequence
(SEQ ID NO: 365)
GACATCCAGATGACCCAGTCTCCATCCTCCCTGTCTGCATCTGTAGGAGACAGAGTCACCATCACTTGCCGGGCAAG
TCAGAGCATTAGCAGCTATTTAAATTGGTATCAGCAGAAACCAGGGAAAGCCCCTAAGCTCCTGATCTATGCTGCAT
CCAGTTTGCAAAGTGGGGTCCCGTCAAGGTTCAGTGGCAGTGGATCTGGGACAGATTTCACTCTCACCATCAGCAGT
CTGCAACCTGAAGATTTTGCAACTTACTACTGTCAACAGAGTTACAGTACCCCTCCGATCACCTTCGGCCAAGGGAC
ACGACTGGAGATTAAA
LCVR (V_{L}) Amino Acid Sequence
(SEQ ID NO: 366)
DIQMTQSPSSLSASVGDRVTITCRASQSISSYLNWYQQKPGKAPKLLIYAASSLQSGVPSRFSGSGSGTDFTLTISS
LQPEDFATYYCQQSYSTPPITFGQGTRLEIK
LCDR1:
(SEQ ID NO: 367)
QSISSY
LCDR2:
(SEQ ID NO: 368)
AAS
LCDR3:
(SEQ ID NO: 369)
QQSYSTPPIT
12834B
HCVR (V_{H}) Nucleotide Sequence
(SEQ ID NO: 370)
CAGGTTCAGCTGGTGCAGTCTGGAGCTGAGGTGAAGAAGCCTGGGGCCTCTGTGAAGGTCTCCTGCAAGGCTTCTGG
TTACACCTTTACCAGCTATGGTATCAGCTGGGTGCGACAGGCCCCTGGACAAGGGCTTGAGTGGATGGGATGGATCA
GTGTTTACCATGGTAACACAAACTATGCACAGAAGTTCCAGGGCAGAGTCACCATGACCACAGACACATCCACGAGC
ACAGCCTACATGGAGCTGAGGAGCCTGAGATCTGACGACACGGCCGTGTATTACTGTGCGAGAGAGGGGTATTACGA
TTTTTGGAGTGGTTATTACCCTTTTGACTACTGGGGCCAGGGAACCCTGGTCACCGTCTCCTCA
HCVR (V_{H}) Amino Acid Sequence
(SEQ ID NO: 371)
QVQLVQSGAEVKKPGASVKVSCKASGYTFTSYGISWVRQAPGQGLEWMGWISVYHGNTNYAQKFQGRVTMTTDTSTS
TAYMELRSLRSDDTAVYYCAREGYYDFWSGYYPFDYWGQGTLVTVSS
or
(SEQ ID NO: 700)
EVQLVESGAEVKKPGASVKVSCKASGYTFTSYGISWVRQAPGQGLEWMGWISVYHGNTNYAQKFQGRVTMTTDTSTS
TAYMELRSLRSDDTAVYYCAREGYYDFWSGYYPFDYWGQGTTVTVSS
HCDR1:
(SEQ ID NO: 372)
GYTFTSYG
HCDR2:
(SEQ ID NO: 373)
ISVYHGNT
HCDR3:
(SEQ ID NO: 374)
AREGYYDFWSGYYPFDY
LCVR (V_{L}) Nucleotide Sequence
(SEQ ID NO: 375)
GACATCCAGATGACCCAGTCTCCATCCTCCCTGTCTGCATCTGTAGGAGACAGAGTCACCATCACTTGCCGGGCAAG
TCAGAGCATTAGCAGCTATTTAAATTGGTATCAGCAGAAACCAGGGAAAGCCCCTAAGCTCCTGATCTATGCTGCAT
CCAGTTTGCAAAGTGGGGTCCCGTCAAGGTTCAGTGGCAGTGGATCTGGGACAGATTTCACTCTCACCATCAGCAGT
CTGCAACCTGAAGATTTTGCAACTTACTACTGTCAACAGAGTTACAGTACCCCTCCGATCACCTTCGGCCAAGGGAC
ACGACTGGAGATTAAA
LCVR (V_{L}) Amino Acid Sequence
(SEQ ID NO: 376)
DIQMTQSPSSLSASVGDRVTITCRASQSISSYLNWYQQKPGKAPKLLIYAASSLQSGVPSRFSGSGSGTDFTLTISS
LQPEDFATYYCQQSYSTPPITFGQGTRLEIK
LCDR1:
(SEQ ID NO: 377)
QSISSY
LCDR2:
(SEQ ID NO: 378)
AAS
LCDR3:
(SEQ ID NO: 379)
QQSYSTPPIT
12835B
HCVR (V_{H}) Nucleotide Sequence
(SEQ ID NO: 380)
GAGGTGCAGCTGGTGGAGTCTGGGGGAGGCTTGATACAACCTGGAGGGTCCCTGAGACTCTCCTGTGAAGCCTCTGG
ATTCACCTTCAGAAATTATGAAATGAATTGGGTCCGCCAGGCTCCAGGGAAGGGGCTGGAGTGGGTTTCATATATTA
GTAGTAGTGGTAATATGAAAGACTACGCAGAGTCTGTGAAGGGCCGATTCACCATCTCCAGAGACAATGTCAAGAAT
TCACTGCAGCTGCAAATGAACAGCCTGAGAGTCGAGGACACGGCTGTTTATTACTGTGCGAGAGACGAGTTTCCTTA
CGGAATGGACGTCTGGGGCCAAGGGACCACGGTCACCGTCTCCTCA
HCVR (V_{H}) Amino Acid Sequence
(SEQ ID NO: 381)
EVQLVESGGGLIQPGGSLRLSCEASGFTFRNYEMNWVRQAPGKGLEWVSYISSSGNMKDYAESVKGRFTISRDNVKN
SLQLQMNSLRVEDTAVYYCARDEFPYGMDVWGQGTTVTVSS
HCDR1:
(SEQ ID NO: 382)
GFTFRNYE
HCDR2:
(SEQ ID NO: 383)
ISSSGNMK
HCDR3:
(SEQ ID NO: 384)
ARDEFPYGMDV
LCVR (V_{L}) Nucleotide Sequence
(SEQ ID NO: 385)
GACATCCAGATGACCCAGTCTCCATCCTCCCTGTCTGCATCTGTAGGAGACAGAGTCACCATCACTTGCCGGGCAAG
TCAGAGCATTAGCAGCTATTTAAATTGGTATCAGCAGAAACCAGGGAAAGCCCCTAAGCTCCTGATCTATGCTGCAT
CCAGTTTGCAAAGTGGGGTCCCGTCAAGGTTCAGTGGCAGTGGATCTGGGACAGATTTCACTCTCACCATCAGCAGT
CTGCAACCTGAAGATTTTGCAACTTACTACTGTCAACAGAGTTACAGTACCCCTCCGATCACCTTCGGCCAAGGGAC
ACGACTGGAGATTAAA
LCVR (V_{L}) Amino Acid Sequence
(SEQ ID NO: 386)
DIQMTQSPSSLSASVGDRVTITCRASQSISSYLNWYQQKPGKAPKLLIYAASSLQSGVPSRFSGSGSGTDFTLTISS
LQPEDFATYYCQQSYSTPPITFGQGTRLEIK
LCDR1:
(SEQ ID NO: 387)
QSISSY
LCDR2:
(SEQ ID NO: 388)
AAS
LCDR3:
(SEQ ID NO: 389)
QQSYSTPPIT
12847B (REGN17083 anti-hTfR Fab; REGN17077 anti-hTfR scFv; REGN16826
anti-hTfR scFv:hGAA)
HCVR (V_{H}) Nucleotide Sequence
(SEQ ID NO: 390)
GAAGTGCAGCTGGTGGAGTCTGGGGGAGGCTTGGTTCAGCCTGGCAGGTCCCTGAGACTCTCCTGTGCAGCCTCTGG
ATTCACCTTTGATGATTATGCCATGAACTGGGTCCGGCAAGCTCCAGGGAAGGGCCTGGAGTGGGTCTCAGGTATTA
GTTGGAGTAGTGGTAGCATGGACTATGCGGACTCTGTGAAGGGCCGATTCACCATCTCCAGAGACAACGCCAAAAAC
TCCCTGTATCTGCAAATGAACAGTCTGAGAACTGAGGACACGGCCTTATATTACTGTGCAAAAGCTAGGGAAGTTGG
AGACTACTACGGTATGGACGTCTGGGGCCAAGGGACCACGGTCACCGTCTCCTCA
HCVR (V_{H}) Amino Acid Sequence
(SEQ ID NO: 391)
EVQLVESGGGLVQPGRSLRLSCAASGFTEDDYAMNWVRQAPGKGLEWVSGISWSSGSMDYADSVKGRFTISRDNAKN
SLYLQMNSLRTEDTALYYCAKAREVGDYYGMDVWGQGTTVTVSS
HCDR1:
(SEQ ID NO: 392)
GFTFDDYA
HCDR2:
(SEQ ID NO: 393)
ISWSSGSM
HCDR3:
(SEQ ID NO: 394)
AKAREVGDYYGMDV
LCVR (V_{L}) Nucleotide Sequence
(SEQ ID NO: 395)
GACATCCAGATGACCCAGTCTCCATCCTCCCTGTCTGCATCTGTAGGAGACAGAGTCACCATCACTTGCCGGGCAAG
TCAGAGCATTAGCAGCTATTTAAATTGGTATCAGCAGAAACCAGGGAAAGCCCCTAAGCTCCTGATCTATGCTGCAT
CCAGTTTGCAAAGTGGGGTCCCGTCAAGGTTCAGTGGCAGTGGATCTGGGACAGATTTCACTCTCACCATCAGCAGT
CTGCAACCTGAAGATTTTGCAACTTACTACTGTCAACAGAGTTACAGTACCCCTCCGATCACCTTCGGCCAAGGGAC
ACGACTGGAGATTAAA
LCVR (V_{L}) Amino Acid Sequence
(SEQ ID NO: 396)
DIQMTQSPSSLSASVGDRVTITCRASQSISSYLNWYQQKPGKAPKLLIYAASSLQSGVPSRFSGSGSGTDFTLTISS
LQPEDFATYYCQQSYSTPPITFGQGTRLEIK
LCDR1:
(SEQ ID NO: 397)
QSISSY
LCDR2:
(SEQ ID NO: 398)
AAS
LCDR3:
(SEQ ID NO: 399)
QQSYSTPPIT
12848B (REGN16827 anti-hTfR scFv:hGAA)
HCVR (V_{H}) Nucleotide Sequence
(SEQ ID NO: 400)
GAAGTGCAGCTGGTGGAGTCTGGGGGAGGCTTGGTACAGCCTGGCAGGTCCCTGACACTCTCCTGTGCAGCCTCTGG
ATTCACCTTTGATAATTTTGGCATGCACTGGGTCCGGCAAGGTCCAGGGAAGGGCCTGGAATGGGTCTCAGGTCTTA
CTTGGAATAGTGGTGTCATAGGCTATGCGGACTCTGTGAAGGGCCGATTCACCATCTCCAGAGACAACGCCAAGAAC
TCCCTGTATCTGCAAATGAACAGTCTGAGACCTGAGGACACGGCCTTATATTACTGTGCAAAAGATATACGGAATTA
CGGCCCCTTTGACTACTGGGGCCAGGGAACCCTGGTCACCGTCTCCTCA
HCVR (V_{H}) Amino Acid Sequence
(SEQ ID NO: 401)
EVQLVESGGGLVQPGRSLTLSCAASGFTFDNFGMHWVRQGPGKGLEWVSGLTWNSGVIGYADSVKGRFTISRDNAKN
SLYLQMNSLRPEDTALYYCAKDIRNYGPFDYWGQGTLVTVSS
HCDR1:
(SEQ ID NO: 402)
GFTFDNFG
HCDR2:
(SEQ ID NO: 403)
LTWNSGVI
HCDR3:
(SEQ ID NO: 404)
AKDIRNYGPFDY
LCVR (V_{L}) Nucleotide Sequence
(SEQ ID NO: 405)
GAAATTGTGTTGACGCAGTCTCCAGGCACCCTGTCTTTGTCTCCAGGGGAAAGAGCCACCCTCTCCTGCAGGGCCAG
TCAGAGTGTTAGCAGCAGCTACTTAGCCTGGTACCAGCAGAAACCTGGCCAGGCTCCCAGGCTCCTCATCTATGGTG
CATCCAGCAGGGCCACTGGCATCCCAGACAGGTTCAGTGGCAGTGGGTCTGGGACAGACTTCACTCTCACCATCAGC
AGACTGGAGCCTGAAGATTTTGCAGTGTATTACTGTCAGCAGTATGGTAGCTCACCTTGGACGTTCGGCCAAGGGAC
CAAGGTGGAAATCAAA
LCVR (V_{L}) Amino Acid Sequence
(SEQ ID NO: 406)
EIVLTQSPGTLSLSPGERATLSCRASQSVSSSYLAWYQQKPGQAPRLLIYGASSRATGIPDRFSGSGSGTDFTLTIS
RLEPEDFAVYYCQQYGSSPWTFGQGTKVEIK
LCDR1:
(SEQ ID NO: 407)
QSVSSSY
LCDR2:
(SEQ ID NO: 408)
GAS
LCDR3:
(SEQ ID NO: 409)
QQYGSSPWT
12843B (REGN17075 anti-hTfR scFv; REGN16824 anti-hTfR scFv:hGAA;
REGN17081 anti-hTfR Fab)
HCVR (V_{H}) Nucleotide Sequence
(SEQ ID NO: 410)
GAGGTGCAGCTGGTGGAGTCTGGGGGAGGCTTAGTACAGCCTGGAGGGTCCCTAAGACTCTCCTGTGCAGCCTCTGG
ATTCACCTTCAATATTTTTGAAATGAACTGGGTCCGCCAGGCTCCAGGGAAGGGGCTGGAGTGGATTTCCTACATTA
GTAGTCGTGGAACTACCACATACTACGCAGACTCTGTGAGGGGCCGATTCACCATCTCCAGAGACAACGCCAAGAAC
TCACTGTATCTGCAAATGAACAGCCTGAGAGCCGAGGACACGGCTGTTTATTACTGTGCGAGAGATTATGAAGCAAC
AATCCCTTTTGACTTCTGGGGCCAGGGAACCCTGGTCACCGTCTCCTCA
HCVR (V_{H}) Amino Acid Sequence
(SEQ ID NO: 411)
EVQLVESGGGLVQPGGSLRLSCAASGFTFNIFEMNWVRQAPGKGLEWISYISSRGTTTYYADSVRGRFTISRDNAKN
SLYLQMNSLRAEDTAVYYCARDYEATIPFDFWGQGTLVTVSS
HCDR1:
(SEQ ID NO: 412)
GFTFNIFE
HCDR2:
(SEQ ID NO: 413)
ISSRGTTT
HCDR3:
(SEQ ID NO: 414)
ARDYEATIPFDF
LCVR (V_{L}) Nucleotide Sequence
(SEQ ID NO: 415)
GACATCCAGATGACCCAGTCTCCATCCTCCCTGTCTGCATCTGTAGGAGACAGAGTCACCATCACTTGCCGGGCAAG
TCAGAGCATTAGCAGCTATTTAAATTGGTATCAGCAGAAACCAGGGAAAGCCCCTAAGCTCCTGATCTATGCTGCAT
CCAGTTTGCAAAGTGGGGTCCCGTCAAGGTTCAGTGGCAGTGGATCTGGGACAGATTTCACTCTCACCATCAGCAGT
CTGCAACCTGAAGATTTTGCAACTTACTACTGTCAACAGAGTTACAGTACCCCTCCGATCACCTTCGGCCAAGGGAC
ACGACTGGAGATTAAA
LCVR (V_{L}) Amino Acid Sequence
(SEQ ID NO: 416)
DIQMTQSPSSLSASVGDRVTITCRASQSISSYLNWYQQKPGKAPKLLIYAASSLQSGVPSRFSGSGSGTDFTLTISS
LQPEDFATYYCQQSYSTPPITFGQGTRLEIK
LCDR1:
(SEQ ID NO: 417)
QSISSY
LCDR2:
(SEQ ID NO: 418)
AAS
LCDR3:
(SEQ ID NO: 419)
QQSYSTPPIT
12844B
HCVR (V_{H}) Nucleotide Sequence
(SEQ ID NO: 420)
GAGGTGCAGCTGGTGGAGTCTGGGGGAAGTGTGGTACGGCCTGGGGGGTCCCTGAGACTCTCCTGTGAAGCCTCTGG
ATTCACCTTTGATGATTATGGCATGAGCTGGGTCCGCCAAGATCCAGGGAAGGGGCTGGAGTGGGTCTCTGGTATTA
ATTGGAATGGTGATAGAACAAATTATGCAGACTCTGTGAAGGGCCGATTCATCATTTCCAGAGACAACGCCAAGAAC
TCTGTGTATCTACAAATGAACAGTCTGAGAGCGGAGGACTCGGCCTTGTATCACTGTGCGAGAGATCAGGGACTCGG
AGTGGCAGCTACCCTTGACTACTGGGGCCAGGGAACCCTGGTCACCGTCTCCTCA
HCVR (V_{H}) Amino Acid Sequence
(SEQ ID NO: 421)
EVQLVESGGSVVRPGGSLRLSCEASGFTFDDYGMSWVRQDPGKGLEWVSGINWNGDRTNYADSVKGRFIISRDNAKN
SVYLQMNSLRAEDSALYHCARDQGLGVAATLDYWGQGTLVTVSS
or
(SEQ ID NO: 701)
EVQLVESGGSVVRPGGSLRLSCEASGFTFDDYGMSWVRQDPGKGLEWVSGINWNGDRTNYADSVKGRFIISRDNAKN
SVYLQMNSLRAEDSALYHCARDQGLGVAATLDYWGQGTMVTVSS
HCDR1:
(SEQ ID NO: 422)
GFTFDDYG
HCDR2:
(SEQ ID NO: 423)
INWNGDRT
HCDR3:
(SEQ ID NO: 424)
ARDQGLGVAATLDY
LCVR (V_{L}) Nucleotide Sequence
(SEQ ID NO: 425)
GACATCCAGATGACCCAGTCTCCATCCTCCCTGTCTGCATCTGTAGGAGACAGAGTCACCATCACTTGCCGGGCAAG
TCAGAGCATTAGCAGCTATTTAAATTGGTATCAGCAGAAACCAGGGAAAGCCCCTAAGCTCCTGATCTATGCTGCAT
CCAGTTTGCAAAGTGGGGTCCCGTCAAGGTTCAGTGGCAGTGGATCTGGGACAGATTTCACTCTCACCATCAGCAGT
CTGCAACCTGAAGATTTTGCAACTTACTACTGTCAACAGAGTTACAGTACCCCTCCGATCACCTTCGGCCAAGGGAC
ACGACTGGAGATTAAA
LCVR (V_{L}) Amino Acid Sequence
(SEQ ID NO: 426)
DIQMTQSPSSLSASVGDRVTITCRASQSISSYLNWYQQKPGKAPKLLIYAASSLQSGVPSRFSGSGSGTDFTLTISS
LQPEDFATYYCQQSYSTPPITFGQGTRLEIK
LCDR1:
(SEQ ID NO: 427)
QSISSY
LCDR2:
(SEQ ID NO: 428)
AAS
LCDR3:
(SEQ ID NO: 429)
QQSYSTPPIT
12845B (REGN17082 Fab; REGN17076 scFv; REGN16825 anti-hTfR scFv:hGAA)
HCVR (V_{H}) Nucleotide Sequence
(SEQ ID NO: 430)
GAGGTGCAGCTGGTGGAGTCTGGGGGAGGCTTGGTACAGCCTGGAGGGTCCCTGAGACTCTCCTGTGCAGCCTCTGG
ATTCACCGTCAGTAATTATGAAATGAACTGGGTCCGCCAGGCTCCAGGGAAGGGGCTGGAGTGGGTTTCATACATTA
GTAGTAGTACCAGTAACATATACTACGCAGACTCTGTGAAGGGCCGATTCACCATCTCCAGAGACAACGCCGAGAAC
TCACTGTATCTGCAGATGAACAGCCTGAGAGTCGAGGACACGGCTGTTTATTACTGTGTGAGAGATGGGATTGTAGT
AGTTCCAGTTGGTCGTGGATACTACTATTACGGTTTGGACGTCTGGGGCCAAGGGACCACGGTCACCGTCTCCTCA
HCVR (V_{H}) Amino Acid Sequence
(SEQ ID NO: 431)
EVQLVESGGGLVQPGGSLRLSCAASGFTVSNYEMNWVRQAPGKGLEWVSYISSSTSNIYYADSVKGRFTISRDNAEN
SLYLQMNSLRVEDTAVYYCVRDGIVVVPVGRGYYYYGLDVWGQGTTVTVSS
HCDR1:
(SEQ ID NO: 432)
GFTVSNYE
HCDR2:
(SEQ ID NO: 433)
ISSSTSNI
HCDR3:
(SEQ ID NO: 434)
VRDGIVVVPVGRGYYYYGLDV
LCVR (V_{L}) Nucleotide Sequence
(SEQ ID NO: 435)
GACATCCAGATGACCCAGTCTCCATCCTCCCTGTCTGCATCTGTAGGAGACAGAGTCACCATCACTTGCCGGGCAAG
TCAGAGCATTAGCAGCTATTTAAATTGGTATCAGCAGAAACCAGGGAAAGCCCCTAAGCTCCTGATCTATGCTGCAT
CCAGTTTGCAAAGTGGGGTCCCGTCAAGGTTCAGTGGCAGTGGATCTGGGACAGATTTCACTCTCACCATCAGCAGT
CTGCAACCTGAAGATTTTGCAACTTACTACTGTCAACAGAGTTACAGTACCCCTCCGATCACCTTCGGCCAAGGGAC
ACGACTGGAGATTAAA
LCVR (V_{L}) Amino Acid Sequence
(SEQ ID NO: 436)
DIQMTQSPSSLSASVGDRVTITCRASQSISSYLNWYQQKPGKAPKLLIYAASSLQSGVPSRFSGSGSGTDFTLTISS
LQPEDFATYYCQQSYSTPPITFGQGTRLEIK
LCDR1:
(SEQ ID NO: 437)
QSISSY
LCDR2:
(SEQ ID NO: 438)
AAS
LCDR3:
(SEQ ID NO: 439)
QQSYSTPPIT
12839B (REGN17080 Fab; REGN17074 scFv; REGN16822 anti-hTfR scFv:hGAA)
HCVR (V_{H}) Nucleotide Sequence
(SEQ ID NO: 440)
CAGGTGCAGCTGGTGGAGTCTGGGGGAGGCGTGGTCCAGCCTGGAAGGTCCCTGAGACTCTCCTGCGCAGCCTCTGG
ATTCCCCTTTAGTAATTATGTCATGTATTGGGTCCGCCAGGCTCCAGGCAAGGGGCTGGAGTGGGTGGCTCTTATTT
TTTTTGACGGAAAGAAAAACTATCATGCAGACTCCGTGAAGGGCCGATTCACCATAACCAGAGACAATTCCAAAAAT
ATGTTATATCTGCAAATGAACAGCCTGAGACCTGAGGACGCGGCTGTGTATTACTGTGCGAAAATCCATTGTCCTAA
TGGTGTATGTTACAAGGGGTATTACGGAATGGACGTCTGGGGCCAAGGGACCACGGTCACCGTCTCCTCA
HCVR (V_{H}) Amino Acid Sequence
(SEQ ID NO: 441)
QVQLVESGGGVVQPGRSLRLSCAASGFPFSNYVMYWVRQAPGKGLEWVALIFFDGKKNYHADSVKGRFTITRDNSKN
MLYLQMNSLRPEDAAVYYCAKIHCPNGVCYKGYYGMDVWGQGTTVTVSS
HCDR1:
(SEQ ID NO: 442)
GFPFSNYV
HCDR2:
(SEQ ID NO: 443)
IFFDGKKN
HCDR3:
(SEQ ID NO: 444)
AKIHCPNGVCYKGYYGMDV
LCVR (V_{L}) Nucleotide Sequence
(SEQ ID NO: 445)
GACATCCAGATGACCCAGTCTCCATCCTCCCTGTCTGCATCTGTAGGAGACAGAGTCACCATCACTTGCCGGGCAAG
TCAGAGCATTAGCAGCTATTTAAATTGGTATCAGCAGAAACCAGGGAAAGCCCCTAAGCTCCTGATCTATGCTGCAT
CCAGTTTGCAAAGTGGGGTCCCGTCAAGGTTCAGTGGCAGTGGATCTGGGACAGATTTCACTCTCACCATCAGCAGT
CTGCAACCTGAAGATTTTGCAACTTACTACTGTCAACAGAGTTACAGTACCCCTCCGATCACCTTCGGCCAAGGGAC
ACGACTGGAGATTAAA
LCVR (V_{L}) Amino Acid Sequence
(SEQ ID NO: 446)
DIQMTQSPSSLSASVGDRVTITCRASQSISSYLNWYQQKPGKAPKLLIYAASSLQSGVPSRFSGSGSGTDFTLTISS
LQPEDFATYYCQQSYSTPPITFGQGTRLEIK
LCDR1:
(SEQ ID NO: 447)
QSISSY
LCDR2:
(SEQ ID NO: 448)
AAS
LCDR3:
(SEQ ID NO: 449)
QQSYSTPPIT
12841B (REGN16823 anti-hTfR scFv:hGAA)
HCVR (V_{H}) Nucleotide Sequence
(SEQ ID NO: 450)
GAGGTGCAGCTGGTGGAGTCTGGGGGAGGCTTGGTCCAGCCTGGGGGGTCCCTAAGACTCTCCTGTGCAGCCTCTGG
ATTCACCTTTAGTAACTATTGGATGAACTGGGTCCGCCAGGCTCCAGGGAAGGGACTGGAGTGGGTGGCCAATATAA
AAGAAGATGGAGGTAAGAAATTGTATGTGGACTCTGTGAAGGGCCGATTCACCATCTCCAGAGACAACGCCAAGAAC
TCACTGTTTCTGCAAATGAACAGCCTGAGAGCCGAGGACACGGCTGTGTATTATTGTGCGAGAGAAGATACAACTTT
GGTTGTGGACTACTACTACTACGGTATGGACGTCTGGGGCCAAGGGACCACGGTCACCGTCTCCTCA
HCVR (V_{H}) Amino Acid Sequence
(SEQ ID NO: 451)
EVQLVESGGGLVQPGGSLRLSCAASGFTFSNYWMNWVRQAPGKGLEWVANIKEDGGKKLYVDSVKGRFTISRDNAKN
SLFLQMNSLRAEDTAVYYCAREDTTLVVDYYYYGMDVWGQGTTVTVSS
HCDR1:
(SEQ ID NO: 452)
GFTFSNYW
HCDR2:
(SEQ ID NO: 453)
IKEDGGKK
HCDR3:
(SEQ ID NO: 454)
AREDTTLVVDYYYYGMDV
LCVR (V_{L}) Nucleotide Sequence
(SEQ ID NO: 455)
GACATCCAGATGACCCAGTCTCCATCCTCCCTGTCTGCATCTGTAGGAGACAGAGTCACCATCACTTGCCGGGCAAG
TCAGAGCATTAGCAGCTATTTAAATTGGTATCAGCAGAAACCAGGGAAAGCCCCTAAGCTCCTGATCTATGCTGCAT
CCAGTTTGCAAAGTGGGGTCCCGTCAAGGTTCAGTGGCAGTGGATCTGGGACAGATTTCACTCTCACCATCAGCAGT
CTGCAACCTGAAGATTTTGCAACTTACTACTGTCAACAGAGTTACAGTACCCCTCCGATCACCTTCGGCCAAGGGAC
ACGACTGGAGATTAAA
LCVR (V_{L}) Amino Acid Sequence
(SEQ ID NO: 456)
DIQMTQSPSSLSASVGDRVTITCRASQSISSYLNWYQQKPGKAPKLLIYAASSLQSGVPSRFSGSGSGTDFTLTISS
LQPEDFATYYCQQSYSTPPITFGQGTRLEIK
LCDR1:
(SEQ ID NO: 457)
QSISSY
LCDR2:
(SEQ ID NO: 458)
AAS
LCDR3:
(SEQ ID NO: 459)
QQSYSTPPIT
12850B (REGN16828 anti-hTfR scFv:hGAA)
HCVR (V_{H}) Nucleotide Sequence
(SEQ ID NO: 460)
CAGGTCCAGCTGGTGCAGTCTGGGGCTGAGGTGAAGAAGCCTGGGTCCTCGGTGAAGGTCTCCTGCAAGGCTTCTGG
AGGCACCTTCAACACCTATGCTATCACCTGGGTGCGACAGGCCCCTGGACAAGGGCTTGAATGGATGGGGGGAATCA
TCCCTATCTCTGGCATAGCAGAGTACGCACAGAAGTTCCAGGGCAGAGTCACGATCACCACGGATGACTCCTCGACC
ACAGCCTACATGGAACTGAACAGTCTGAGATCTGAGGACACGGCCGTGTATTACTGTGCGAGCTGGAACTACGCACT
CTACTACTTCTACGGTATGGACGTCTGGGGCCGAGGGACCACGGTCACCGTCTCCTCA
HCVR (V_{H}) Amino Acid Sequence
(SEQ ID NO: 461)
QVQLVQSGAEVKKPGSSVKVSCKASGGTFNTYAITWVRQAPGQGLEWMGGIIPISGIAEYAQKFQGRVTITTDDSST
TAYMELNSLRSEDTAVYYCASWNYALYYFYGMDVWGRGTTVTVSS
HCDR1:
(SEQ ID NO: 462)
GGTFNTYA
HCDR2:
(SEQ ID NO: 463)
IIPISGIA
HCDR3:
(SEQ ID NO: 464)
ASWNYALYYFYGMDV
LCVR (V_{L}) Nucleotide Sequence
(SEQ ID NO: 465)
GAAATTGTGTTGACGCAGTCTCCAGGCACCCTGTCTTTGTCTCCAGGGGAAAGAGCCACCCTCTCCTGCAGGGCCAG
TCAGAGTGTTAGCAGCAGCTACTTAGCCTGGTACCAGCAGAAACCTGGCCAGGCTCCCAGGCTCCTCATCTATGGTG
CATCCAGCAGGGCCACTGGCATCCCAGACAGGTTCAGTGGCAGTGGGTCTGGGACAGACTTCACTCTCACCATCAGC
AGACTGGAGCCTGAAGATTTTGCAGTGTATTACTGTCAGCAGTATGGTAGCTCACCTTGGACGTTCGGCCAAGGGAC
CAAGGTGGAAATCAAA
LCVR (V_{L}) Amino Acid Sequence
(SEQ ID NO: 466)
EIVLTQSPGTLSLSPGERATLSCRASQSVSSSYLAWYQQKPGQAPRLLIYGASSRATGIPDRFSGSGSGTDFTLTIS
RLEPEDFAVYYCQQYGSSPWTFGQGTKVEIK
LCDR1:
(SEQ ID NO: 467)
QSVSSSY
LCDR2:
(SEQ ID NO: 468)
GAS
LCDR3:
(SEQ ID NO: 469)
QQYGSSPWT
69261
HCVR (V_{H}) Nucleotide Sequence
(SEQ ID NO: 470)
CAGGTGCAGCTGGTGGAGTCTGGGGGAGGCTTGGTCAAGCCTGGAGGGTCCCTGAGACTCTCCTGTGCAGCCTCTGG
ATTCACCTTCAGTGTCTATTACATGAACTGGATCCGCCAGGCTCCAGGGAAGGGCCTGGAGTGGGTTTCATACATTA
GTAGTAGTGGTAGTACCATATACTACGCAGACTCTGTGAAGGGCCGATTCACCATCTCCAGGGACAACGCCAAGAAC
TCACTGTATCTCCAAATGAACAGTCTGAGAGCCGAGGACACGGCCGTATATTACTGTGGGAGAGAAGGGTATAGTGG
GACTTATTCTTATTACGGTATGGACGTCTGGGGCCAAGGGACCACGGTCACCGTCTCCTCA
HCVR (V_{H}) Amino Acid Sequence
(SEQ ID NO: 471)
QVQLVESGGGLVKPGGSLRLSCAASGFTFSVYYMNWIRQAPGKGLEWVSYISSSGSTIYYADSVKGRFTISRDNAKN
SLYLQMNSLRAEDTAVYYCGREGYSGTYSYYGMDVWGQGTTVTVSS
or
(SEQ ID NO: 702)
EVQLVESGGGLVKPGGSLRLSCAASGFTFSVYYMNWIRQAPGKGLEWVSYISSSGSTIYYADSVKGRFTISRDNAKN
SLYLQMNSLRAEDTAVYYCGREGYSGTYSYYGMDVWGQGTTVTVSS
HCDR1:
(SEQ ID NO: 472)
GFTFSVYY
HCDR2:
(SEQ ID NO: 473)
ISSSGSTI
HCDR3:
(SEQ ID NO: 474)
GREGYSGTYSYYGMDV
LCVR (V_{L}) Nucleotide Sequence
(SEQ ID NO: 475)
GATATTGTGATGACTCAGTCTCCACTCTCCCTGCCCGTCACCCCTGGAGAGCCGGCCTCCATCTCCTGCAGGTCTAG
TCAGAGCCTCCTGCATAGTAATGGATACAACTATTTGGATTGGTACCTGCAGAAGCCAGGGCAGTCTCCACAGTTCC
TGATCTATTTGGGTTCTAATCGGGCCTCCGGGGTCCCTGACAGGTTCAGTGGCAGTGGATCAGGCACAGATTTTACA
CTGAAAATCAACAGAGTGGAGGCTGAGGATGTTGGGGTTTATTACTGCATGCAAGCTCTACAAACTCCGTACACTTT
TGGCCAGGGGACCAAGCTGGAGATCAAA
LCVR (V_{L}) Amino Acid Sequence
(SEQ ID NO: 476)
DIVMTQSPLSLPVTPGEPASISCRSSQSLLHSNGYNYLDWYLQKPGQSPQFLIYLGSNRASGVPDRFSGSGSGTDET
LKINRVEAEDVGVYYCMQALQTPYTFGQGTKLEIK
or
(SEQ ID NO: 632)
DIQLTQSPLSLPVTPGEPASISCRSSQSLLHSNGYNYLDWYLQKPGQSPQFLIYLGSNRASGVPDRFSGSGSGTDFT
LKINRVEAEDVGVYYCMQALQTPYTFGQGTKVEIK
LCDR1:
(SEQ ID NO: 477)
QSLLHSNGYNY
LCDR2:
(SEQ ID NO: 478)
LGS
LCDR3:
(SEQ ID NO: 479)
MQALQTPYT
69263
HCVR (V_{H}) Nucleotide Sequence
(SEQ ID NO: 480)
GAAGTGCAGCTGGTGGAGTCTGGGGGAGGGTTGGTACAGCCTGGCAGGTCCCTGAGACTCTCCTGTGCAGTCTCTGG
ATTCACCTTTGATGATTATGCCATGCACTGGGTCCGGCAAGCTCCAGGGAAGGGCCTGGAGTGGGTCTCAGGTATTA
GTTGGAATAGTGGTACCAGAGGATATGCGGACTCTGTGAAGGGCCGATTCACCATCTCCAGAGACAACGCCAAGAAC
TCCCTGTATCTGCAAATGAACAGTCTGAGAGGTGAGGACACGGCCTTGTATTACTGTGTAAAAGATATTACGATATC
CCCCAACTACTACGGTATGGACGTCTGGGGCCAAGGGACCACGGTCACCGTCTCCTCA
HCVR (V_{H}) Amino Acid Sequence
(SEQ ID NO: 481)
EVQLVESGGGLVQPGRSLRLSCAVSGFTEDDYAMHWVRQAPGKGLEWVSGISWNSGTRGYADSVKGRFTISRDNAKN
SLYLQMNSLRGEDTALYYCVKDITISPNYYGMDVWGQGTTVTVSS
HCDR1:
(SEQ ID NO: 482)
GFTFDDYA
HCDR2:
(SEQ ID NO: 483)
ISWNSGTR
HCDR3:
(SEQ ID NO: 484)
VKDITISPNYYGMDV
LCVR (V_{L}) Nucleotide Sequence
(SEQ ID NO: 485)
GACATCCAGATGACCCAGTCTCCATCCTCCCTGTCTGCATCTGTAGGAGACAGAGTCACCATCACTTGCCGGGCGAG
TCAGGACATTAGCCATTATTCAGCCTGGTATCAGCAGAAACCAGGGAAACTTCCTAACCTCCTGATCTATGCTGCAT
CCACTTTGCAATCAGGGGTCCCATCTCGGTTCAGTGGCAGTGGATCTGGGACAGATTTCTCTCTCACCACCAGCAGC
CTGCAGCCTGAAGATGTTGCAACTTATTACTGTCAAAAGTATAACAGTGTCCCTCTCACTTTCGGCGGAGGGACCAA
GGTGGAGATCAAA
LCVR (V_{L}) Amino Acid Sequence
(SEQ ID NO: 486)
DIQMTQSPSSLSASVGDRVTITCRASQDISHYSAWYQQKPGKLPNLLIYAASTLQSGVPSRFSGSGSGTDFSLTTSS
LQPEDVATYYCQKYNSVPLTFGGGTKVEIK
or
(SEQ ID NO: 703)
DIQLTQSPSSLSASVGDRVTITCRASQDISHYSAWYQQKPGKLPNLLIYAASTLQSGVPSRFSGSGSGTDFSLTTSS
LQPEDVATYYCQKYNSVPLTFGGRTKVEIK
LCDR1:
(SEQ ID NO: 487)
QDISHY
LCDR2:
(SEQ ID NO: 488)
AAS
LCDR3:
(SEQ ID NO: 489)
QKYNSVPLT

TABLE 3
Anti-hTfR scFv Molecules in Fusion Proteins.

| | SEQ | |
|---|---|---|
| Antibody | ID | |
| clone | NO | Amino acid sequence (Vk-3xG4S(SEQ ID NO: 616)-Vh) |
| 12795B | 492 | DIQMTQSPSSLSASVGDRVTITCRASQGIRDHFGWYQQKPGKAPKRLIYAASSLHSGVPSRFSGSGS |
| | | GTEFTLTISSLQPEDFATYYCLQYDTYPLTFGGGTKVEIKGGGGSGGGGSGGGGSEVQLVESGGGLV |
| | | QPGGSLRLSCATSGFTFTSYDMKWVRQAPGLGLEWVSAISGSGGNTYYADSVKGRFTISRDNSRNTL |
| | | YLQMNSLRAEDTAVYYCTRSHDFGAFDYFDYWGQGTLVTVSS |
| 12798B | 493 | EIVMTQSPATLSVSPGERATLSCRASQTVSSNLAWYQQKPGQAPRLLIYGSSSRATGIPARFSGSGS |
| | | GTEFTLTISSLQSEDFAVYYCQQYNNWPPYTFGQGTKLEIKGGGGSGGGGSGGGGSEVQLVESGGDL |
| | | VQPGRSLRLSCAASGFTFDDYAMHWVRQAPGKGLEWVSGISWNSATRVYADSVKGRFTISRDNAKNF |
| | | LYLQMNSLRSEDTALYHCAKDMDISLGYYGLDVWGQGTTVTVSS |
| 12799B | 494 | DIQMTQSPSSVSASVGDRVTITCRASQGIASWLAWYQQKPGKAPELLIYAASSLQGGVPSRFSGSGS |
| | | GTDFTLTISSLQPEDFAIYYCQQANYFPWTFGQGTKVEIKGGGGSGGGGSGGGGSQITLKESGPTLV |
| | | KPTQTLTLTCTFSGFSLSTSGVGVVWIRQPPGKALEWLALIYWNDHKRYSPSLGSRLTITKDTSKNQ |
| | | VVLTMTNMDPVDTATYYCAHYSGSYSYYYYGLDVWGQGTTVTVSS |
| 12801B | 495 | DIQMTQSPSSLSASVGDRVTITCRASQGIRTDLGWYQQKPGKAPKRLIYAASSLQSGVPSRFSGSGS |
| | | GTEFTLTISSLRPEDFATFYCLQYNSYPLTFGGGTKVEIKGGGGSGGGGSGGGGSEVQLLESGGALV |
| | | QPGGSLRLSCAASGFTFTSYAMHWVRQAPGKGLEWVSSIRGSGGGTYSADSVKGRFTISRDNSRDTL |
| | | YLQMNSVRAEDTAVYYCARSHDYGAFDFFDYWGQGTLVTVSS |
| 12802B | 496 | EIVMTQSPATLSVSPGERATLSCRASQSVSINLAWYQQKPGQAPRLLIFVASTRATGIPARFSGSGS |
| | | GTEFTLTISSLQSEDFATYYCQQYDIWPYTFGQGTKLEIKGGGGSGGGGSGGGGSQVQLVESGGGLV |
| | | KPGGSLRLSCAASGFTFSDYFMSWIRQAPGKGLEWVSYISSTGSTINYADSVKGRFTISRDNVKNSL |
| | | YLQMTSLRVEDTAVYYCTRDNWNYEYWGQGTLVTVSS |
| 12808B | 497 | DIQMTQSPSSLSASVGDRVTINCRASQGIRNDLGWYQQKPGKAPKRLIYAASSLQSGVPLRFSGSGS |
| | | GTEFTLTINNLQPEDFATYYCLSHNSYPWTFGQGTKVEIKGGGGSGGGGSGGGGSQLQLQESGPGLV |
| | | KPSETLSLTCTVSGESISSNTYYWGWIRQPPGKGLEWIGSIDYSGTTNYNPSLKSRVTISVDTSRNH |
| | | FSLRLRSVTAADTAVYYCAREWGNYGYYYGMDVWGQGTTVTVSS |
| 12812B | 498 | DIQMTQSPPSVSASVGDRVTITCRASQGISSWLAWYQQKPGKAPKLLIYAASSLQSGVPSRFSGSGS |
| | | GTDFTLTISSLQPEDFATYYCQQANSFPRTFGQGTKVEIKGGGGSGGGGSGGGGSQVQLVQSGAEVK |
| | | KPGSSVRVSCKASRGTFSSYAISWVRQAPGQGLEWMGGIIPIFGTANYAQKFLARVTITADESTSTA |
| | | YMELSSLRSEDTAVYYCAREKGWNYFDYWGQGTLVTVSS |
| 12816B | 499 | DIVMTQSPLSLPVTPGEPASISCRSSQSLLHGNGYNYLTWYLQKPGQSPQLLIYLGSNRASGVPDRF |
| | | SGSGSGTDFTLKISRVEAEDVGVYYCMQALQTPYTFGQGTKLEIKGGGGSGGGGSGGGGSQVQLVES |
| | | GGGLVKPGGSLRLSCAASGFTFSDYYMNWIRQAPGKGLEWVSYISSSGTTIYYADSVKGRFTISRDN |
| | | AKKSLYLEMNSLRAEDTAVYYCAREGYGNDYYYYGIDVWGQGTTVTVSS |
| 12833B | 500 | DIQMTQSPSSLSASVGDRVTITCRASQSISSYLNWYQQKPGKAPKLLIYAASSLQSGVPSRFSGSGS |
| | | GTDFTLTISSLQPEDFATYYCQQSYSTPPITFGQGTRLEIKGGGGSGGGGSGGGGSQVQLVESGGGV |
| | | VQPGRSLRLSCAASGFTFSSFGMHWVRQAPGKGLEWVIFISYDGSDKYYADSVKGRFAISRDSSKNT |
| | | LYLQMNSLRAEDTAVYYCAKENGILTDSYGMDVWGQGTTVTVSS |
| 12834B | 501 | DIQMTQSPSSLSASVGDRVTITCRASQSISSYLNWYQQKPGKAPKLLIYAASSLQSGVPSRFSGSGS |
| | | GTDFTLTISSLQPEDFATYYCQQSYSTPPITFGQGTRLEIKGGGGSGGGGSGGGGSQVQLVQSGAEV |
| | | KKPGASVKVSCKASGYTFTSYGISWVRQAPGQGLEWMGWISVYHGNTNYAQKFQGRVTMTTDTSTST |
| | | AYMELRSLRSDDTAVYYCAREGYYDFWSGYYPFDYWGQGTLVTVSS |
| 12835B | 502 | DIQMTQSPSSLSASVGDRVTITCRASQSISSYLNWYQQKPGKAPKLLIYAASSLQSGVPSRFSGSGS |
| | | GTDFTLTISSLQPEDFATYYCQQSYSTPPITFGQGTRLEIKGGGGSGGGGSGGGGSEVQLVESGGGL |
| | | IQPGGSLRLSCEASGFTFRNYEMNWVRQAPGKGLEWVSYISSSGNMKDYAESVKGRFTISRDNVKNS |
| | | LQLQMNSLRVEDTAVYYCARDEFPYGMDVWGQGTTVTVSS |
| 12839B | 503 | DIQMTQSPSSLSASVGDRVTITCRASQSISSYLNWYQQKPGKAPKLLIYAASSLQSGVPSRFSGSGS |
| | | GTDFTLTISSLQPEDFATYYCQQSYSTPPITFGQGTRLEIKGGGGSGGGGSGGGGSQVQLVESGGGV |
| | | VQPGRSLRLSCAASGFPFSNYVMYWVRQAPGKGLEWVALIFFDGKKNYHADSVKGRFTITRDNSKNM |
| | | LYLQMNSLRPEDAAVYYCAKIHCPNGVCYKGYYGMDVWGQGTTVTVSS |
| 12841B | 504 | DIQMTQSPSSLSASVGDRVTITCRASQSISSYLNWYQQKPGKAPKLLIYAASSLQSGVPSRFSGSGS |
| | | GTDFTLTISSLQPEDFATYYCQQSYSTPPITFGQGTRLEIKGGGGSGGGGSGGGGSEVQLVESGGGL |
| | | VQPGGSLRLSCAASGFTFSNYWMNWVRQAPGKGLEWVANIKEDGGKKLYVDSVKGRFTISRDNAKNS |
| | | LFLQMNSLRAEDTAVYYCAREDTTLVVDYYYYGMDVWGQGTTVTVSS |
| 12843B | 505 | DIQMTQSPSSLSASVGDRVTITCRASQSISSYLNWYQQKPGKAPKLLIYAASSLQSGVPSRFSGSGS |
| | | GTDFTLTISSLQPEDFATYYCQQSYSTPPITFGQGTRLEIKGGGGSGGGGSGGGGSEVQLVESGGGL |
| | | VQPGGSLRLSCAASGFTFNIFEMNWVRQAPGKGLEWISYISSRGTTTYYADSVRGRFTISRDNAKNS |
| | | LYLQMNSLRAEDTAVYYCARDYEATIPFDFWGQGTLVTVSS |
| 12844B | 506 | DIQMTQSPSSLSASVGDRVTITCRASQSISSYLNWYQQKPGKAPKLLIYAASSLQSGVPSRFSGSGS |
| | | GTDFTLTISSLQPEDFATYYCQQSYSTPPITFGQGTRLEIKGGGGSGGGGSGGGGSEVQLVESGGSV |
| | | VRPGGSLRLSCEASGFTFDDYGMSWVRQDPGKGLEWVSGINWNGDRTNYADSVKGRFIISRDNAKNS |
| | | VYLQMNSLRAEDSALYHCARDQGLGVAATLDYWGQGTLVTVSS |
| 12845B | 507 | DIQMTQSPSSLSASVGDRVTITCRASQSISSYLNWYQQKPGKAPKLLIYAASSLQSGVPSRFSGSGS |
| | | GTDFTLTISSLQPEDFATYYCQQSYSTPPITFGQGTRLEIKGGGGSGGGGSGGGGSEVQLVESGGGL |
| | | VQPGGSLRLSCAASGFTVSNYEMNWVRQAPGKGLEWVSYISSSTSNIYYADSVKGRFTISRDNAENS |
| | | LYLQMNSLRVEDTAVYYCVRDGIVVVPVGRGYYYYGLDVWGQGTTVTVSS |
| 12847B | 508 | DIQMTQSPSSLSASVGDRVTITCRASQSISSYLNWYQQKPGKAPKLLIYAASSLQSGVPSRFSGSGS |
| | | GTDFTLTISSLQPEDFATYYCQQSYSTPPITFGQGTRLEIKGGGGSGGGGSGGGGSEVQLVESGGGL |
| | | VQPGRSLRLSCAASGFTFDDYAMNWVRQAPGKGLEWVSGISWSSGSMDYADSVKGRFTISRDNAKNS |
| | | LYLQMNSLRTEDTALYYCAKAREVGDYYGMDVWGQGTTVTVSS |
| 12848B | 509 | EIVLTQSPGTLSLSPGERATLSCRASQSVSSSYLAWYQQKPGQAPRLLIYGASSRATGIPDRFSGSG |
| | | SGTDFTLTISRLEPEDFAVYYCQQYGSSPWTFGQGTKVEIKGGGGSGGGGSGGGGSEVQLVESGGGL |
| | | VQPGRSLTLSCAASGFTFDNFGMHWVRQGPGKGLEWVSGLTWNSGVIGYADSVKGRFTISRDNAKNS |
| | | LYLQMNSLRPEDTALYYCAKDIRNYGPFDYWGQGTLVTVSS |
| 12850B | 510 | EIVLTQSPGTLSLSPGERATLSCRASQSVSSSYLAWYQQKPGQAPRLLIYGASSRATGIPDRFSGSG |
| | | SGTDFTLTISRLEPEDFAVYYCQQYGSSPWTFGQGTKVEIKGGGGSGGGGSGGGGSQVQLVQSGAEV |
| | | KKPGSSVKVSCKASGGTFNTYAITWVRQAPGQGLEWMGGIIPISGIAEYAQKFQGRVTITTDDSSTT |
| | | AYMELNSLRSEDTAVYYCASWNYALYYFYGMDVWGRGTTVTVSS |
| 31863B | 511 | DIQMTQSPSSLSASIGDRVTITCRASQGISNYLAWYQQKPGKVPKLLIYAASTLQSGVPSRFSGSGS |
| | | GTDFTLTISSLQPEDVATYYCQNHNSVPLTFGGGTKVEIKGGGGSGGGGSGGGGSEVQLVESGGGLV |
| | | QPGGSLRLSCAASGFTFNSYAMTWVRQAPGKGLEWVSFIGGSTGNTYYAGSVKGRFTISSDNSKKTL |
| | | YLQMNSLRAEDTAVYYCAKGGAARRMEYFQHWGQGTLVTVSS |
| 31874B | 512 | DIQMTQSPSSLSASVGDRVTITCRASQGISNYLAWYQQKPGKVPNLLIYAASTLQSGVPSRFSGSGS |
| | | GTDFTLTISSLQPEDVATYYCQKYNSAPLTFGGGTKVEIKGGGGSGGGGSGGGGSEVQLVESGGGLV |
| | | QPGGSLRLSCAASGFAFSSYAMTWVRQAPGKGLEWVSVISGTGGSTYYADSVKGRFTISRDNSKNTL |
| | | YLQMNSLRAEDTAVYYCAKGGAARRMEYFQYWGQGTLVTVSS |
| 69261 | 513 | DIVMTQSPLSLPVTPGEPASISCRSSQSLLHSNGYNYLDWYLQKPGQSPQFLIYLGSNRASGVPDRF |
| | | SGSGSGTDFTLKINRVEAEDVGVYYCMQALQTPYTFGQGTKLEIKGGGGSGGGGSGGGGSQVQLVES |
| | | GGGLVKPGGSLRLSCAASGFTFSVYYMNWIRQAPGKGLEWVSYISSSGSTIYYADSVKGRFTISRDN |
| | | AKNSLYLQMNSLRAEDTAVYYCGREGYSGTYSYYGMDVWGQGTTVTVSS |
| 69263 | 514 | DIQMTQSPSSLSASVGDRVTITCRASQDISHYSAWYQQKPGKLPNLLIYAASTLQSGVPSRFSGSGS |
| | | GTDFSLTTSSLQPEDVATYYCQKYNSVPLTFGGGTKVEIKGGGGSGGGGSGGGGSEVQLVESGGGLV |
| | | QPGRSLRLSCAVSGFTFDDYAMHWVRQAPGKGLEWVSGISWNSGTRGYADSVKGRFTISRDNAKNSL |
| | | YLQMNSLRGEDTALYYCVKDITISPNYYGMDVWGQGTTVTVSS |
| 69305 | 515 | DIQMTQSPSSLSASVGDRVTITCRASQSIDRYLNWYRQKPGKAPKLLIYTTSSLQSGVPSRFSGSGS |
| | | GTDFTLTLSSLQPEDFATYYCQQSYSPPLTFGGGTKVEIKGGGGSGGGGSGGGGSQVQLVESGGGVV |
| | | QPGRSLRLSCAASGFTFSSYGMHWVRQAPGKGLEWVAVIWYDGSNKYYADSVKGRFTISRDISKNTL |
| | | YLQMNSLRAEDTAVYYCAGQLDLFFDYWGQGTLVTVSS |
| 69307 | 516 | DIQMTQSPSSVSASVGDRVTITCRASQGISSWLAWYQQKPGKAPKLLIYAASSLQSGVPSRFSGSGS |
| | | GTDFTLTISSLQPEDFATYYCQKADSLPYAFGQGTKLEIKGGGGSGGGGSGGGGSEVQLVESGGGLV |
| | | QPGGSLRLSCTASGFTFSNYWMTWVRQAPGKGLEWVANIKEDGSEKEYVDSVKGRFTISRDNAKNSL |
| | | YLQMNSLRGEDTAVYYCARDGEQLVDYYYYYVMDVWGQGTTVTVSS |
| 69323 | 517 | DIQMTQSPSSLSASVGDRVTITCRASQSISSYLNWYQQKPGKAPKVLIYAASSLQSGVPSRFSGSGS |
| | | GTDFTLTISSLQPEDFATYYCQQSYSIPLTFGGGTKVEIKGGGGSGGGGSGGGGSEVQLVESGGGLV |
| | | QPGRSLRLSCAASGFTFDDYAMHWVRQAPGKGLEWVSGISWNSGYIGYADSVKGRFTISRDNAENSL |
| | | HLQMNSLRAEDTALYYCARGGSTLVRGVKGGYYGMDVWGQGTTVTVSS |
| 69326 | 518 | EIVMTQSPATLSVSPGERATLSCRASQSVSSNFAWYQQKPGQAPRLLIYSASSRATGIPVRFSGSGS |
| | | GTEFTLTISSLQSEDFAVYYCQQYNIWPRTFGQGTKVEIKGGGGSGGGGSGGGGSEVQLVESGGGLV |
| | | QPGGSLRLSCAVSGFIFSSYEMNWVRQAPGKGLEWVSYISSSGSTIFYADSVKGRFTISRDNAKNSL |
| | | YLQMNSLRAEDTAVYYCVSGVVLFDVWGQGTMVTVSS |
| 69329 | 519 | DIQMTQSPSSVSASVGDRVTITCRASQGISSWLAWYQQKPGKAPKLLIYAASSLQSGVPSRFSGSGS |
| | | GTDFTLTISSLQPEDFATYYCQKANSFPYTFGQGTKLEIKGGGGSGGGGSGGGGSEVQLVESGGGLV |
| | | QPGGSLRLSCAASGFTFSNYWMTWVRQAPGKGLEWVANIKEDGSEKDYVDSVKGRFTISRDNAKNSL |
| | | YLQMNSLRGEDTAVYYCARDGEQLVDYYYYYVMDVWGQGTTVTVSS |
| 69331 | 520 | DIQLTQSPSSLSASVGDRVTITCWASQGISSYLAWYQQKPGKAPKLLIYAASTLQSGVPSRFSGSGS |
| | | GTEFTLTISSLQPEDFATYYCQQLNSYPLTFGGGTKVEIKGGGGSGGGGSGGGGSQVQLVESGGGVV |
| | | QPGRSLRLSCIASGFTFSVYGIHWVRQAPGKGLEWMAVISHDGNIKHYADSVKGRFTISRDNSKNTL |
| | | YLQINSLRTEDTAVYYCAKDTWNSLDTFDIWGQGTMVTVSS |
| 69332 | 521 | AIQMTQSPSSLSASVGDRVTITCRASQGIRNDLGWYQQKPGKAPKLLIYAASTLQSGVPSRFSGSGS |
| | | GTDFTLTISSLQPEDFATYYCLQDYNYPFTFGPGTKVDIKGGGGSGGGGSGGGGSQVTLRESGPALV |
| | | KPSQTLTLTCTFSGFSLNTYGMFVSWIRQPPGKALEWLAHIHWDDDKYYSTSLKTRLTISKDTSKNQ |
| | | VVLTMTNMDPVDTATYYCARGHNNLNYIIHWGQGTLVTVSS |
| 69340 | 522 | EIVLTQSPATLSLSPGERATLSCRASQSVSSYLAWYQQKPGQAPRLLIHDVSNRATGIPARFSGSGS |
| | | GTDFTLTISSLEPEDFVVYYCQQRSDWPITFGQGTRLEIKGGGGSGGGGSGGGGSEVQLVESGGGLV |
| | | QPGRSLRLSCAASGFTFDDKAMHWVRQVPGKGLEWISGISWNSGTIGYADSVKGRFIISRDNAKNSL |
| | | YLQMNSLRAEDTALYYCAKDGDTSGWYWYGLDVWGQGTTVTVSS |
| 69348 | 523 | DIQMTQSPSSLSASVGDRVTITCRASQSIRNVLGWFQQKPGKAPQRLIYAASSLQSGVPSRFSGSGS |
| | | GTEFTLTISSLQPEDFATYYCLQHNFYPLTFGGGTKVEIKGGGGSGGGGSGGGGSQVQLVESGGGVV |
| | | QPGRSLRLSCAASGFTFTTYGMHWVRQAPGKGLEWVAVIWYDGSNKYYGDSVKGRFTISRDNSKNTL |
| | | YLQMNSLRVDDTAVYYCTRTHGYTRSSDGFDYWGQGTLVTVSS |

Heavy and Light Chains of anti-hTfR Fabs in anti-hTfR:GAA Fusion Proteins:
(1) 31874B
Fab Light Chain
(SEQ ID NO: 540)
DIQMTQSPSSLSASVGDRVTITCRASQGISNYLAWYQQKPGKVPNLLIYAASTLQSGVPSRFSGSGSGTDFTLTISS
LQPEDVATYYCQKYNSAPLTFGGGTKVEIKRTVAAPSVFIFPPSDEQLKSGTASVVCLLNNFYPREAKVQWKVDNAL
QSGNSQESVTEQDSKDSTYSLSSTLTLSKADYEKHKVYACEVTHQGLSSPVTKSFNRGEC
Fab Heavy Chain
(SEQ ID NO: 541)
EVQLVESGGGLVQPGGSLRLSCAASGFAFSSYAMTWVRQAPGKGLEWVSVISGTGGSTYYADSVKGRFTISRDNSKN
TLYLQMNSLRAEDTAVYYCAKGGAARRMEYFQYWGQGTLVTVSSASTKGPSVFPLAPSSKSTSGGTAALGCLVKDYF
PEPVTVSWNSGALTSGVHTFPAVLQSSGLYSLSSVVTVPSSSLGTQTYICNVNHKPSNTKVDKKVEPKSCDKTH
(2) 31863B
Fab Light Chain
(SEQ ID NO: 542)
DIQMTQSPSSLSASIGDRVTITCRASQGISNYLAWYQQKPGKVPKLLIYAASTLQSGVPSRFSGSGSGTDFTLTISS
LQPEDVATYYCQNHNSVPLTFGGGTKVEIKRTVAAPSVFIFPPSDEQLKSGTASVVCLLNNFYPREAKVQWKVDNAL
QSGNSQESVTEQDSKDSTYSLSSTLTLSKADYEKHKVYACEVTHQGLSSPVTKSFNRGEC
Fab Heavy Chain
(SEQ ID NO: 543)
EVQLVESGGGLVQPGGSLRLSCAASGFTFNSYAMTWVRQAPGKGLEWVSFIGGSTGNTYYAGSVKGRFTISSDNSKK
TLYLQMNSLRAEDTAVYYCAKGGAARRMEYFQHWGQGTLVTVSSASTKGPSVFPLAPSSKSTSGGTAALGCLVKDYF
PEPVTVSWNSGALTSGVHTFPAVLQSSGLYSLSSVVTVPSSSLGTQTYICNVNHKPSNTKVDKKVEPKSCDKTH
(3) 69348
Fab Light Chain
(SEQ ID NO: 544)
DIQMTQSPSSLSASVGDRVTITCRASQSIRNVLGWFQQKPGKAPQRLIYAASSLQSGVPSRFSGSGSGTEFTLTISS
LQPEDFATYYCLQHNFYPLTFGGGTKVEIKRTVAAPSVFIFPPSDEQLKSGTASVVCLLNNFYPREAKVQWKVDNAL
QSGNSQESVTEQDSKDSTYSLSSTLTLSKADYEKHKVYACEVTHQGLSSPVTKSFNRGEC
Fab Heavy Chain
(SEQ ID NO: 545)
QVQLVESGGGVVQPGRSLRLSCAASGFTFTTYGMHWVRQAPGKGLEWVAVIWYDGSNKYYGDSVKGRFTISRDNSKN
TLYLQMNSLRVDDTAVYYCTRTHGYTRSSDGFDYWGQGTLVTVSSASTKGPSVFPLAPSSKSTSGGTAALGCLVKDY
FPEPVTVSWNSGALTSGVHTFPAVLQSSGLYSLSSVVTVPSSSLGTQTYICNVNHKPSNTKVDKKVEPKSCDKTH
(4) 69340
Fab Light Chain
(SEQ ID NO: 546)
EIVLTQSPATLSLSPGERATLSCRASQSVSSYLAWYQQKPGQAPRLLIHDVSNRATGIPARFSGSGSGTDFTLTISS
LEPEDFVVYYCQQRSDWPITFGQGTRLEIKRTVAAPSVFIFPPSDEQLKSGTASVVCLLNNFYPREAKVQWKVDNAL
QSGNSQESVTEQDSKDSTYSLSSTLTLSKADYEKHKVYACEVTHQGLSSPVTKSFNRGEC
Fab Heavy Chain
(SEQ ID NO: 547)
EVQLVESGGGLVQPGRSLRLSCAASGFTFDDKAMHWVRQVPGKGLEWISGISWNSGTIGYADSVKGRFIISRDNAKN
SLYLQMNSLRAEDTALYYCAKDGDTSGWYWYGLDVWGQGTTVTVSSASTKGPSVFPLAPSSKSTSGGTAALGCLVKD
YFPEPVTVSWNSGALTSGVHTFPAVLQSSGLYSLSSVVTVPSSSLGTQTYICNVNHKPSNTKVDKKVEPKSCDKTH
(5) 69331
Fab Light Chain
(SEQ ID NO: 548)
DIQLTQSPSSLSASVGDRVTITCWASQGISSYLAWYQQKPGKAPKLLIYAASTLQSGVPSRFSGSGSGTEFTLTISS
LQPEDFATYYCQQLNSYPLTFGGGTKVEIKRTVAAPSVFIFPPSDEQLKSGTASVVCLLNNFYPREAKVQWKVDNAL
QSGNSQESVTEQDSKDSTYSLSSTLTLSKADYEKHKVYACEVTHQGLSSPVTKSFNRGEC
Fab Heavy Chain
(SEQ ID NO: 549)
QVQLVESGGGVVQPGRSLRLSCIASGFTFSVYGIHWVRQAPGKGLEWMAVISHDGNIKHYADSVKGRFTISRDNSKN
TLYLQINSLRTEDTAVYYCAKDTWNSLDTFDIWGQGTMVTVSSASTKGPSVFPLAPSSKSTSGGTAALGCLVKDYFP
EPVTVSWNSGALTSGVHTFPAVLQSSGLYSLSSVVTVPSSSLGTQTYICNVNHKPSNTKVDKKVEPKSCDKTH
(6) 69332
Fab Light Chain
(SEQ ID NO: 550)
AIQMTQSPSSLSASVGDRVTITCRASQGIRNDLGWYQQKPGKAPKLLIYAASTLQSGVPSRFSGSGSGTDFTLTISS
LQPEDFATYYCLQDYNYPFTFGPGTKVDIKRTVAAPSVFIFPPSDEQLKSGTASVVCLLNNFYPREAKVQWKVDNAL
QSGNSQESVTEQDSKDSTYSLSSTLTLSKADYEKHKVYACEVTHQGLSSPVTKSFNRGEC
Fab Heavy Chain
(SEQ ID NO: 551)
QVTLRESGPALVKPSQTLTLTCTFSGFSLNTYGMFVSWIRQPPGKALEWLAHIHWDDDKYYSTSLKTRLTISKDTSK
NQVVLTMTNMDPVDTATYYCARGHNNLNYIIHWGQGTLVTVSSASTKGPSVFPLAPSSKSTSGGTAALGCLVKDYFP
EPVTVSWNSGALTSGVHTFPAVLQSSGLYSLSSVVTVPSSSLGTQTYICNVNHKPSNTKVDKKVEPKSCDKTH
(7) 69326
Fab Light Chain
(SEQ ID NO: 552)
EIVMTQSPATLSVSPGERATLSCRASQSVSSNFAWYQQKPGQAPRLLIYSASSRATGIPVRFSGSGSGTEFTLTISS
LQSEDFAVYYCQQYNIWPRTFGQGTKVEIKRTVAAPSVFIFPPSDEQLKSGTASVVCLLNNFYPREAKVQWKVDNAL
QSGNSQESVTEQDSKDSTYSLSSTLTLSKADYEKHKVYACEVTHQGLSSPVTKSFNRGEC
Fab Heavy Chain
(SEQ ID NO: 553)
EVQLVESGGGLVQPGGSLRLSCAVSGFIFSSYEMNWVRQAPGKGLEWVSYISSSGSTIFYADSVKGRFTISRDNAKN
SLYLQMNSLRAEDTAVYYCVSGVVLFDVWGQGTMVTVSSASTKGPSVFPLAPSSKSTSGGTAALGCLVKDYFPEPVT
VSWNSGALTSGVHTFPAVLQSSGLYSLSSVVTVPSSSLGTQTYICNVNHKPSNTKVDKKVEPKSCDKTH
(8) 69329
Fab Light Chain
(SEQ ID NO: 554)
DIQMTQSPSSVSASVGDRVTITCRASQGISSWLAWYQQKPGKAPKLLIYAASSLQSGVPSRFSGSGSGTDFTLTISS
LQPEDFATYYCQKANSFPYTFGQGTKLEIKRTVAAPSVFIFPPSDEQLKSGTASVVCLLNNFYPREAKVQWKVDNAL
QSGNSQESVTEQDSKDSTYSLSSTLTLSKADYEKHKVYACEVTHQGLSSPVTKSFNRGEC
Fab Heavy Chain
(SEQ ID NO: 555)
EVQLVESGGGLVQPGGSLRLSCAASGFTFSNYWMTWVRQAPGKGLEWVANIKEDGSEKDYVDSVKGRFTISRDNAKN
SLYLQMNSLRGEDTAVYYCARDGEQLVDYYYYYVMDVWGQGTTVTVSSASTKGPSVFPLAPSSKSTSGGTAALGCLV
KDYFPEPVTVSWNSGALTSGVHTFPAVLQSSGLYSLSSVVTVPSSSLGTQTYICNVNHKPSNTKVDKKVEPKSCDKT
H
(9) 69323
Fab Light Chain
(SEQ ID NO: 556)
DIQMTQSPSSLSASVGDRVTITCRASQSISSYLNWYQQKPGKAPKVLIYAASSLQSGVPSRFSGSGSGTDFTLTISS
LQPEDFATYYCQQSYSIPLTFGGGTKVEIKRTVAAPSVFIFPPSDEQLKSGTASVVCLLNNFYPREAKVQWKVDNAL
QSGNSQESVTEQDSKDSTYSLSSTLTLSKADYEKHKVYACEVTHQGLSSPVTKSFNRGEC
Fab Heavy Chain
(SEQ ID NO: 557)
EVQLVESGGGLVQPGRSLRLSCAASGFTFDDYAMHWVRQAPGKGLEWVSGISWNSGYIGYADSVKGRFTISRDNAEN
SLHLQMNSLRAEDTALYYCARGGSTLVRGVKGGYYGMDVWGQGTTVTVSSASTKGPSVFPLAPSSKSTSGGTAALGC
LVKDYFPEPVTVSWNSGALTSGVHTFPAVLQSSGLYSLSSVVTVPSSSLGTQTYICNVNHKPSNTKVDKKVEPKSCD
KTH
(10) 69305
Fab Light Chain
(SEQ ID NO: 558)
DIQMTQSPSSLSASVGDRVTITCRASQSIDRYLNWYRQKPGKAPKLLIYTTSSLQSGVPSRFSGSGSGTDFTLTLSS
LQPEDFATYYCQQSYSPPLTFGGGTKVEIKRTVAAPSVFIFPPSDEQLKSGTASVVCLLNNFYPREAKVQWKVDNAL
QSGNSQESVTEQDSKDSTYSLSSTLTLSKADYEKHKVYACEVTHQGLSSPVTKSFNRGEC
Fab Heavy Chain
(SEQ ID NO: 559)
QVQLVESGGGVVQPGRSLRLSCAASGFTFSSYGMHWVRQAPGKGLEWVAVIWYDGSNKYYADSVKGRFTISRDISKN
TLYLQMNSLRAEDTAVYYCAGQLDLFFDYWGQGTLVTVSSASTKGPSVFPLAPSSKSTSGGTAALGCLVKDYFPEPV
TVSWNSGALTSGVHTFPAVLQSSGLYSLSSVVTVPSSSLGTQTYICNVNHKPSNTKVDKKVEPKSCDKTH
(11) 69307
Fab Light Chain
(SEQ ID NO: 560)
DIQMTQSPSSVSASVGDRVTITCRASQGISSWLAWYQQKPGKAPKLLIYAASSLQSGVPSRFSGSGSGTDFTLTISS
LQPEDFATYYCQKADSLPYAFGQGTKLEIKRTVAAPSVFIFPPSDEQLKSGTASVVCLLNNFYPREAKVQWKVDNAL
QSGNSQESVTEQDSKDSTYSLSSTLTLSKADYEKHKVYACEVTHQGLSSPVTKSFNRGEC
Fab Heavy Chain
(SEQ ID NO: 561)
EVQLVESGGGLVQPGGSLRLSCTASGFTFSNYWMTWVRQAPGKGLEWVANIKEDGSEKEYVDSVKGRFTISRDNAKN
SLYLQMNSLRGEDTAVYYCARDGEQLVDYYYYYVMDVWGQGTTVTVSSASTKGPSVFPLAPSSKSTSGGTAALGCLV
KDYFPEPVTVSWNSGALTSGVHTFPAVLQSSGLYSLSSVVTVPSSSLGTQTYICNVNHKPSNTKVDKKVEPKSCDKT
H
(12) 12795B
Fab Light Chain
(SEQ ID NO: 562)
DIQMTQSPSSLSASVGDRVTITCRASQGIRDHFGWYQQKPGKAPKRLIYAASSLHSGVPSRFSGSGSGTEFTLTISS
LQPEDFATYYCLQYDTYPLTFGGGTKVEIKRTVAAPSVFIFPPSDEQLKSGTASVVCLLNNFYPREAKVQWKVDNAL
QSGNSQESVTEQDSKDSTYSLSSTLTLSKADYEKHKVYACEVTHQGLSSPVTKSFNRGEC
Fab Heavy Chain
(SEQ ID NO: 563)
EVQLVESGGGLVQPGGSLRLSCATSGFTFTSYDMKWVRQAPGLGLEWVSAISGSGGNTYYADSVKGRFTISRDNSRN
TLYLQMNSLRAEDTAVYYCTRSHDFGAFDYFDYWGQGTLVTVSSASTKGPSVFPLAPSSKSTSGGTAALGCLVKDYF
PEPVTVSWNSGALTSGVHTFPAVLQSSGLYSLSSVVTVPSSSLGTQTYICNVNHKPSNTKVDKKVEPKSCDKTH
(13) 12798B (REGN17078)
Fab Light Chain
(SEQ ID NO: 564)
EIVMTQSPATLSVSPGERATLSCRASQTVSSNLAWYQQKPGQAPRLLIYGSSSRATGIPARFSGSGSGTEFTLTISS
LQSEDFAVYYCQQYNNWPPYTFGQGTKLEIKRTVAAPSVFIFPPSDEQLKSGTASVVCLLNNFYPREAKVQWKVDNA
LQSGNSQESVTEQDSKDSTYSLSSTLTLSKADYEKHKVYACEVTHQGLSSPVTKSFNRGEC
Fab Heavy Chain
(SEQ ID NO: 565)
EVQLVESGGDLVQPGRSLRLSCAASGFTFDDYAMHWVRQAPGKGLEWVSGISWNSATRVYADSVKGRFTISRDNAKN
FLYLQMNSLRSEDTALYHCAKDMDISLGYYGLDVWGQGTTVTVSSASTKGPSVFPLAPSSKSTSGGTAALGCLVKDY
FPEPVTVSWNSGALTSGVHTFPAVLQSSGLYSLSSVVTVPSSSLGTQTYICNVNHKPSNTKVDKKVEPKSCDKTH;
or
(SEQ ID NO: 604)
EVQLVESGGDLVQPGRSLRLSCAASGFTFDDYAMHWVRQAPGKGLEWVSGISWNSATRVYADSVKGRFTISRDNAKN
FLYLQMNSLRSEDTALYHCAKDMDISLGYYGLDVWGQGTTVTVSSASTKGPSVFPLAPCSRSTSESTAALGCLVKDY
FPEPVTVSWNSGALTSGVHTFPAVLQSSGLYSLSSVVTVPSSSLGTKTYTCNVDHKPSNTKVDKRVESKYGPPLLQG
SG;
or
(SEQ ID NO: 633)
EVQLVESGGDLVQPGRSLRLSCAASGFTFDDYAMHWVRQAPGKGLEWVSGISWNSATRVYADSVKGRFTISRDNAKN
FLYLQMNSLRSEDTALYHCAKDMDISLGYYGLDVWGQGTTVTVSSASTKGPSVFPLAPCSRSTSESTAALGCLVKDY
FPEPVTVSWNSGALTSGVHTFPAVLQSSGLYSLSSVVTVPSSSLGTKTYTCNVDHKPSNTKVDKRVESKYGPP
(14) 12799B (REGN17079)
Fab Light Chain
(SEQ ID NO: 566)
DIQMTQSPSSVSASVGDRVTITCRASQGIASWLAWYQQKPGKAPELLIYAASSLQGGVPSRFSGSGSGTDFTLTISS
LQPEDFAIYYCQQANYFPWTFGQGTKVEIKRTVAAPSVFIFPPSDEQLKSGTASVVCLLNNFYPREAKVQWKVDNAL
QSGNSQESVTEQDSKDSTYSLSSTLTLSKADYEKHKVYACEVTHQGLSSPVTKSFNRGEC
Fab Heavy Chain
(SEQ ID NO: 567)
QITLKESGPTLVKPTQTLTLTCTFSGFSLSTSGVGVVWIRQPPGKALEWLALIYWNDHKRYSPSLGSRLTITKDTSK
NQVVLTMTNMDPVDTATYYCAHYSGSYSYYYYGLDVWGQGTTVTVSSASTKGPSVFPLAPSSKSTSGGTAALGCLVK
DYFPEPVTVSWNSGALTSGVHTFPAVLQSSGLYSLSSVVTVPSSSLGTQTYICNVNHKPSNTKVDKKVEPKSCDKTH;
or
(SEQ ID NO: 605)
QITLKESGPTLVKPTQTLTLTCTFSGFSLSTSGVGVVWIRQPPGKALEWLALIYWNDHKRYSPSLGSRLTITKDTSK
NQVVLTMTNMDPVDTATYYCAHYSGSYSYYYYGLDVWGQGTTVTVSSASTKGPSVFPLAPCSRSTSESTAALGCLVK
DYFPEPVTVSWNSGALTSGVHTFPAVLQSSGLYSLSSVVTVPSSSLGTKTYTCNVDHKPSNTKVDKRVESKYGPPLL
QGSG;
or
(SEQ ID NO: 634)
QITLKESGPTLVKPTQTLTLTCTFSGFSLSTSGVGVVWIRQPPGKALEWLALIYWNDHKRYSPSLGSRLTITKDTSK
NQVVLTMTNMDPVDTATYYCAHYSGSYSYYYYGLDVWGQGTTVTVSSASTKGPSVFPLAPCSRSTSESTAALGCLVK
DYFPEPVTVSWNSGALTSGVHTFPAVLQSSGLYSLSSVVTVPSSSLGTKTYTCNVDHKPSNTKVDKRVESKYGPP
(15) 12801B
Fab Light Chain
(SEQ ID NO: 568)
DIQMTQSPSSLSASVGDRVTITCRASQGIRTDLGWYQQKPGKAPKRLIYAASSLQSGVPSRFSGSGSGTEFTLTISS
LRPEDFATFYCLQYNSYPLTFGGGTKVEIKRTVAAPSVFIFPPSDEQLKSGTASVVCLLNNFYPREAKVQWKVDNAL
QSGNSQESVTEQDSKDSTYSLSSTLTLSKADYEKHKVYACEVTHQGLSSPVTKSFNRGEC
Fab Heavy Chain
(SEQ ID NO: 569)
EVQLLESGGALVQPGGSLRLSCAASGFTFTSYAMHWVRQAPGKGLEWVSSIRGSGGGTYSADSVKGRFTISRDNSRD
TLYLQMNSVRAEDTAVYYCARSHDYGAFDFFDYWGQGTLVTVSSASTKGPSVFPLAPSSKSTSGGTAALGCLVKDYF
PEPVTVSWNSGALTSGVHTFPAVLQSSGLYSLSSVVTVPSSSLGTQTYICNVNHKPSNTKVDKKVEPKSCDKTH
(16) 12802B
Fab Light Chain
(SEQ ID NO: 570)
EIVMTQSPATLSVSPGERATLSCRASQSVSINLAWYQQKPGQAPRLLIFVASTRATGIPARFSGSGSGTEFTLTISS
LQSEDFATYYCQQYDIWPYTFGQGTKLEIKRTVAAPSVFIFPPSDEQLKSGTASVVCLLNNFYPREAKVQWKVDNAL
QSGNSQESVTEQDSKDSTYSLSSTLTLSKADYEKHKVYACEVTHQGLSSPVTKSFNRGEC
Fab Heavy Chain
(SEQ ID NO: 571)
QVQLVESGGGLVKPGGSLRLSCAASGFTFSDYFMSWIRQAPGKGLEWVSYISSTGSTINYADSVKGRFTISRDNVKN
SLYLQMTSLRVEDTAVYYCTRDNWNYEYWGQGTLVTVSSASTKGPSVFPLAPSSKSTSGGTAALGCLVKDYFPEPVT
VSWNSGALTSGVHTFPAVLQSSGLYSLSSVVTVPSSSLGTQTYICNVNHKPSNTKVDKKVEPKSCDKTH
(17) 12808B
Fab Light Chain
(SEQ ID NO: 572)
DIQMTQSPSSLSASVGDRVTINCRASQGIRNDLGWYQQKPGKAPKRLIYAASSLQSGVPLRFSGSGSGTEFTLTINN
LQPEDFATYYCLSHNSYPWTFGQGTKVEIKRTVAAPSVFIFPPSDEQLKSGTASVVCLLNNFYPREAKVQWKVDNAL
QSGNSQESVTEQDSKDSTYSLSSTLTLSKADYEKHKVYACEVTHQGLSSPVTKSFNRGEC
Fab Heavy Chain
(SEQ ID NO: 573)
QLQLQESGPGLVKPSETLSLTCTVSGESISSNTYYWGWIRQPPGKGLEWIGSIDYSGTTNYNPSLKSRVTISVDTSR
NHFSLRLRSVTAADTAVYYCAREWGNYGYYYGMDVWGQGTTVTVSSASTKGPSVFPLAPSSKSTSGGTAALGCLVKD
YFPEPVTVSWNSGALTSGVHTFPAVLQSSGLYSLSSVVTVPSSSLGTQTYICNVNHKPSNTKVDKKVEPKSCDKTH
(18) 12812B
Fab Light Chain
(SEQ ID NO: 574)
DIQMTQSPPSVSASVGDRVTITCRASQGISSWLAWYQQKPGKAPKLLIYAASSLQSGVPSRFSGSGSGTDFTLTISS
LQPEDFATYYCQQANSFPRTFGQGTKVEIKRTVAAPSVFIFPPSDEQLKSGTASVVCLLNNFYPREAKVQWKVDNAL
QSGNSQESVTEQDSKDSTYSLSSTLTLSKADYEKHKVYACEVTHQGLSSPVTKSFNRGEC
Fab Heavy Chain
(SEQ ID NO: 575)
QVQLVQSGAEVKKPGSSVRVSCKASRGTESSYAISWVRQAPGQGLEWMGGIIPIFGTANYAQKFLARVTITADESTS
TAYMELSSLRSEDTAVYYCAREKGWNYFDYWGQGTLVTVSSASTKGPSVFPLAPSSKSTSGGTAALGCLVKDYFPEP
VTVSWNSGALTSGVHTFPAVLQSSGLYSLSSVVTVPSSSLGTQTYICNVNHKPSNTKVDKKVEPKSCDKTH
(19) 12816B
Fab Light Chain
(SEQ ID NO: 576)
DIVMTQSPLSLPVTPGEPASISCRSSQSLLHGNGYNYLTWYLQKPGQSPQLLIYLGSNRASGVPDRFSGSGSGTDFT
LKISRVEAEDVGVYYCMQALQTPYTFGQGTKLEIKRTVAAPSVFIFPPSDEQLKSGTASVVCLLNNFYPREAKVQWK
VDNALQSGNSQESVTEQDSKDSTYSLSSTLTLSKADYEKHKVYACEVTHQGLSSPVTKSFNRGEC
Fab Heavy Chain
(SEQ ID NO: 577)
QVQLVESGGGLVKPGGSLRLSCAASGFTFSDYYMNWIRQAPGKGLEWVSYISSSGTTIYYADSVKGRFTISRDNAKK
SLYLEMNSLRAEDTAVYYCAREGYGNDYYYYGIDVWGQGTTVTVSSASTKGPSVFPLAPSSKSTSGGTAALGCLVKD
YFPEPVTVSWNSGALTSGVHTFPAVLQSSGLYSLSSVVTVPSSSLGTQTYICNVNHKPSNTKVDKKVEPKSCDKTH
(20) 12833B
Fab Light Chain
(SEQ ID NO: 578)
DIQMTQSPSSLSASVGDRVTITCRASQSISSYLNWYQQKPGKAPKLLIYAASSLQSGVPSRFSGSGSGTDFTLTISS
LQPEDFATYYCQQSYSTPPITFGQGTRLEIKRTVAAPSVFIFPPSDEQLKSGTASVVCLLNNFYPREAKVQWKVDNA
LQSGNSQESVTEQDSKDSTYSLSSTLTLSKADYEKHKVYACEVTHQGLSSPVTKSFNRGEC
Fab Heavy Chain
(SEQ ID NO: 579)
QVQLVESGGGVVQPGRSLRLSCAASGFTFSSFGMHWVRQAPGKGLEWVIFISYDGSDKYYADSVKGRFAISRDSSKN
TLYLQMNSLRAEDTAVYYCAKENGILTDSYGMDVWGQGTTVTVSSASTKGPSVFPLAPSSKSTSGGTAALGCLVKDY
FPEPVTVSWNSGALTSGVHTFPAVLQSSGLYSLSSVVTVPSSSLGTQTYICNVNHKPSNTKVDKKVEPKSCDKTH
(21) 12834B
Fab Light Chain
(SEQ ID NO: 580)
DIQMTQSPSSLSASVGDRVTITCRASQSISSYLNWYQQKPGKAPKLLIYAASSLQSGVPSRFSGSGSGTDFTLTISS
LQPEDFATYYCQQSYSTPPITFGQGTRLEIKRTVAAPSVFIFPPSDEQLKSGTASVVCLLNNFYPREAKVQWKVDNA
LQSGNSQESVTEQDSKDSTYSLSSTLTLSKADYEKHKVYACEVTHQGLSSPVTKSFNRGEC
Fab Heavy Chain
(SEQ ID NO: 581)
QVQLVQSGAEVKKPGASVKVSCKASGYTFTSYGISWVRQAPGQGLEWMGWISVYHGNTNYAQKFQGRVTMTTDTSTS
TAYMELRSLRSDDTAVYYCAREGYYDFWSGYYPFDYWGQGTLVTVSSASTKGPSVFPLAPSSKSTSGGTAALGCLVK
DYFPEPVTVSWNSGALTSGVHTFPAVLQSSGLYSLSSVVTVPSSSLGTQTYICNVNHKPSNTKVDKKVEPKSCDKTH
(22) 12835B
Fab Light Chain
(SEQ ID NO: 582)
DIQMTQSPSSLSASVGDRVTITCRASQSISSYLNWYQQKPGKAPKLLIYAASSLQSGVPSRFSGSGSGTDFTLTISS
LQPEDFATYYCQQSYSTPPITFGQGTRLEIKRTVAAPSVFIFPPSDEQLKSGTASVVCLLNNFYPREAKVQWKVDNA
LQSGNSQESVTEQDSKDSTYSLSSTLTLSKADYEKHKVYACEVTHQGLSSPVTKSFNRGEC
Fab Heavy Chain
(SEQ ID NO: 583)
EVQLVESGGGLIQPGGSLRLSCEASGFTFRNYEMNWVRQAPGKGLEWVSYISSSGNMKDYAESVKGRFTISRDNVKN
SLQLQMNSLRVEDTAVYYCARDEFPYGMDVWGQGTTVTVSSASTKGPSVFPLAPSSKSTSGGTAALGCLVKDYFPEP
VTVSWNSGALTSGVHTFPAVLQSSGLYSLSSVVTVPSSSLGTQTYICNVNHKPSNTKVDKKVEPKSCDKTH
(23) 12847B (REGN17083)
Fab Light Chain
(SEQ ID NO: 584)
DIQMTQSPSSLSASVGDRVTITCRASQSISSYLNWYQQKPGKAPKLLIYAASSLQSGVPSRFSGSGSGTDFTLTISS
LQPEDFATYYCQQSYSTPPITFGQGTRLEIKRTVAAPSVFIFPPSDEQLKSGTASVVCLLNNFYPREAKVQWKVDNA
LQSGNSQESVTEQDSKDSTYSLSSTLTLSKADYEKHKVYACEVTHQGLSSPVTKSFNRGEC
Fab Heavy Chain
(SEQ ID NO: 585)
EVQLVESGGGLVQPGRSLRLSCAASGFTFDDYAMNWVRQAPGKGLEWVSGISWSSGSMDYADSVKGRFTISRDNAKN
SLYLQMNSLRTEDTALYYCAKAREVGDYYGMDVWGQGTTVTVSSASTKGPSVFPLAPSSKSTSGGTAALGCLVKDYF
PEPVTVSWNSGALTSGVHTFPAVLQSSGLYSLSSVVTVPSSSLGTQTYICNVNHKPSNTKVDKKVEPKSCDKTH;
or
(SEQ ID NO: 606)
EVQLVESGGGLVQPGRSLRLSCAASGFTFDDYAMNWVRQAPGKGLEWVSGISWSSGSMDYADSVKGRFTISRDNAKN
SLYLQMNSLRTEDTALYYCAKAREVGDYYGMDVWGQGTTVTVSSASTKGPSVFPLAPCSRSTSESTAALGCLVKDYF
PEPVTVSWNSGALTSGVHTFPAVLQSSGLYSLSSVVTVPSSSLGTKTYTCNVDHKPSNTKVDKRVESKYGPPLLQGS
G;
or
(SEQ ID NO: 635)
EVQLVESGGGLVQPGRSLRLSCAASGFTFDDYAMNWVRQAPGKGLEWVSGISWSSGSMDYADSVKGRFTISRDNAKN
SLYLQMNSLRTEDTALYYCAKAREVGDYYGMDVWGQGTTVTVSSASTKGPSVFPLAPCSRSTSESTAALGCLVKDYF
PEPVTVSWNSGALTSGVHTFPAVLQSSGLYSLSSVVTVPSSSLGTKTYTCNVDHKPSNTKVDKRVESKYGPP
(24) 12848B
Fab Light Chain
(SEQ ID NO: 586)
EIVLTQSPGTLSLSPGERATLSCRASQSVSSSYLAWYQQKPGQAPRLLIYGASSRATGIPDRFSGSGSGTDFTLTIS
RLEPEDFAVYYCQQYGSSPWTFGQGTKVEIKRTVAAPSVFIFPPSDEQLKSGTASVVCLLNNFYPREAKVQWKVDNA
LQSGNSQESVTEQDSKDSTYSLSSTLTLSKADYEKHKVYACEVTHQGLSSPVTKSFNRGEC
Fab Heavy Chain
(SEQ ID NO: 587)
EVQLVESGGGLVQPGRSLTLSCAASGFTFDNFGMHWVRQGPGKGLEWVSGLTWNSGVIGYADSVKGRFTISRDNAKN
SLYLQMNSLRPEDTALYYCAKDIRNYGPFDYWGQGTLVTVSSASTKGPSVFPLAPSSKSTSGGTAALGCLVKDYFPE
PVTVSWNSGALTSGVHTFPAVLQSSGLYSLSSVVTVPSSSLGTQTYICNVNHKPSNTKVDKKVEPKSCDKTH
(25) 12843B (REGN17081)
Fab Light Chain
(SEQ ID NO: 588)
DIQMTQSPSSLSASVGDRVTITCRASQSISSYLNWYQQKPGKAPKLLIYAASSLQSGVPSRFSGSGSGTDFTLTISS
LQPEDFATYYCQQSYSTPPITFGQGTRLEIKRTVAAPSVFIFPPSDEQLKSGTASVVCLLNNFYPREAKVQWKVDNA
LQSGNSQESVTEQDSKDSTYSLSSTLTLSKADYEKHKVYACEVTHQGLSSPVTKSFNRGEC
Fab Heavy Chain
(SEQ ID NO: 589)
EVQLVESGGGLVQPGGSLRLSCAASGFTFNIFEMNWVRQAPGKGLEWISYISSRGTTTYYADSVRGRFTISRDNAKN
SLYLQMNSLRAEDTAVYYCARDYEATIPFDFWGQGTLVTVSSASTKGPSVFPLAPSSKSTSGGTAALGCLVKDYFPE
PVTVSWNSGALTSGVHTFPAVLQSSGLYSLSSVVTVPSSSLGTQTYICNVNHKPSNTKVDKKVEPKSCDKTH;
or
(SEQ ID NO: 607)
EVQLVESGGGLVQPGGSLRLSCAASGFTFNIFEMNWVRQAPGKGLEWISYISSRGTTTYYADSVRGRFTISRDNAKN
SLYLQMNSLRAEDTAVYYCARDYEATIPFDFWGQGTLVTVSSASTKGPSVFPLAPCSRSTSESTAALGCLVKDYFPE
PVTVSWNSGALTSGVHTFPAVLQSSGLYSLSSVVTVPSSSLGTKTYTCNVDHKPSNTKVDKRVESKYGPPLLQGSG;
or
(SEQ ID NO: 636)
EVQLVESGGGLVQPGGSLRLSCAASGFTFNIFEMNWVRQAPGKGLEWISYISSRGTTTYYADSVRGRFTISRDNAKN
SLYLQMNSLRAEDTAVYYCARDYEATIPFDFWGQGTLVTVSSASTKGPSVFPLAPCSRSTSESTAALGCLVKDYFPE
PVTVSWNSGALTSGVHTFPAVLQSSGLYSLSSVVTVPSSSLGTKTYTCNVDHKPSNTKVDKRVESKYGPP
(26) 12844B
Fab Light Chain
(SEQ ID NO: 590)
DIQMTQSPSSLSASVGDRVTITCRASQSISSYLNWYQQKPGKAPKLLIYAASSLQSGVPSRFSGSGSGTDFTLTISS
LQPEDFATYYCQQSYSTPPITFGQGTRLEIKRTVAAPSVFIFPPSDEQLKSGTASVVCLLNNFYPREAKVQWKVDNA
LQSGNSQESVTEQDSKDSTYSLSSTLTLSKADYEKHKVYACEVTHQGLSSPVTKSFNRGEC
Fab Heavy Chain
(SEQ ID NO: 591)
EVQLVESGGSVVRPGGSLRLSCEASGFTFDDYGMSWVRQDPGKGLEWVSGINWNGDRTNYADSVKGRFIISRDNAKN
SVYLQMNSLRAEDSALYHCARDQGLGVAATLDYWGQGTLVTVSSASTKGPSVFPLAPSSKSTSGGTAALGCLVKDYF
PEPVTVSWNSGALTSGVHTFPAVLQSSGLYSLSSVVTVPSSSLGTQTYICNVNHKPSNTKVDKKVEPKSCDKTH
(27) 12845B (REGN17082)
Fab Light Chain
(SEQ ID NO: 592)
DIQMTQSPSSLSASVGDRVTITCRASQSISSYLNWYQQKPGKAPKLLIYAASSLQSGVPSRFSGSGSGTDFTLTISS
LQPEDFATYYCQQSYSTPPITFGQGTRLEIKRTVAAPSVFIFPPSDEQLKSGTASVVCLLNNFYPREAKVQWKVDNA
LQSGNSQESVTEQDSKDSTYSLSSTLTLSKADYEKHKVYACEVTHQGLSSPVTKSFNRGEC
Fab Heavy Chain
(SEQ ID NO: 593)
EVQLVESGGGLVQPGGSLRLSCAASGFTVSNYEMNWVRQAPGKGLEWVSYISSSTSNIYYADSVKGRFTISRDNAEN
SLYLQMNSLRVEDTAVYYCVRDGIVVVPVGRGYYYYGLDVWGQGTTVTVSSASTKGPSVFPLAPSSKSTSGGTAALG
CLVKDYFPEPVTVSWNSGALTSGVHTFPAVLQSSGLYSLSSVVTVPSSSLGTQTYICNVNHKPSNTKVDKKVEPKSC
DKTH;
or
(SEQ ID NO: 608)
EVQLVESGGGLVQPGGSLRLSCAASGFTVSNYEMNWVRQAPGKGLEWVSYISSSTSNIYYADSVKGRFTISRDNAEN
SLYLQMNSLRVEDTAVYYCVRDGIVVVPVGRGYYYYGLDVWGQGTTVTVSSASTKGPSVFPLAPCSRSTSESTAALG
CLVKDYFPEPVTVSWNSGALTSGVHTFPAVLQSSGLYSLSSVVTVPSSSLGTKTYTCNVDHKPSNTKVDKRVESKYG
PPLLQGSG;
or
(SEQ ID NO: 637)
EVQLVESGGGLVQPGGSLRLSCAASGFTVSNYEMNWVRQAPGKGLEWVSYISSSTSNIYYADSVKGRFTISRDNAEN
SLYLQMNSLRVEDTAVYYCVRDGIVVVPVGRGYYYYGLDVWGQGTTVTVSSASTKGPSVFPLAPCSRSTSESTAALG
CLVKDYFPEPVTVSWNSGALTSGVHTFPAVLQSSGLYSLSSVVTVPSSSLGTKTYTCNVDHKPSNTKVDKRVESKYG
PP
(28) 12839B (REGN17080)
Fab Light Chain
(SEQ ID NO: 594)
DIQMTQSPSSLSASVGDRVTITCRASQSISSYLNWYQQKPGKAPKLLIYAASSLQSGVPSRFSGSGSGTDFTLTISS
LQPEDFATYYCQQSYSTPPITFGQGTRLEIKRTVAAPSVFIFPPSDEQLKSGTASVVCLLNNFYPREAKVQWKVDNA
LQSGNSQESVTEQDSKDSTYSLSSTLTLSKADYEKHKVYACEVTHQGLSSPVTKSFNRGEC
Fab Heavy Chain
(SEQ ID NO: 595)
QVQLVESGGGVVQPGRSLRLSCAASGFPFSNYVMYWVRQAPGKGLEWVALIFFDGKKNYHADSVKGRFTITRDNSKN
MLYLQMNSLRPEDAAVYYCAKIHCPNGVCYKGYYGMDVWGQGTTVTVSSASTKGPSVFPLAPSSKSTSGGTAALGCL
VKDYFPEPVTVSWNSGALTSGVHTFPAVLQSSGLYSLSSVVTVPSSSLGTQTYICNVNHKPSNTKVDKKVEPKSCDK
TH;
or
(SEQ ID NO: 609)
QVQLVESGGGVVQPGRSLRLSCAASGFPFSNYVMYWVRQAPGKGLEWVALIFFDGKKNYHADSVKGRFTITRDNSKN
MLYLQMNSLRPEDAAVYYCAKIHCPNGVCYKGYYGMDVWGQGTTVTVSSASTKGPSVFPLAPCSRSTSESTAALGCL
VKDYFPEPVTVSWNSGALTSGVHTFPAVLQSSGLYSLSSVVTVPSSSLGTKTYTCNVDHKPSNTKVDKRVESKYGPP
LLQGSG;
or
(SEQ ID NO: 638)
QVQLVESGGGVVQPGRSLRLSCAASGFPFSNYVMYWVRQAPGKGLEWVALIFFDGKKNYHADSVKGRFTITRDNSKN
MLYLQMNSLRPEDAAVYYCAKIHCPNGVCYKGYYGMDVWGQGTTVTVSSASTKGPSVFPLAPCSRSTSESTAALGCL
VKDYFPEPVTVSWNSGALTSGVHTFPAVLQSSGLYSLSSVVTVPSSSLGTKTYTCNVDHKPSNTKVDKRVESKYGPP
(29) H1H12841B
Fab Light Chain
(SEQ ID NO: 596)
DIQMTQSPSSLSASVGDRVTITCRASQSISSYLNWYQQKPGKAPKLLIYAASSLQSGVPSRFSGSGSGTDFTLTISS
LQPEDFATYYCQQSYSTPPITFGQGTRLEIKRTVAAPSVFIFPPSDEQLKSGTASVVCLLNNFYPREAKVQWKVDNA
LQSGNSQESVTEQDSKDSTYSLSSTLTLSKADYEKHKVYACEVTHQGLSSPVTKSFNRGEC
Fab Heavy Chain
(SEQ ID NO: 597)
EVQLVESGGGLVQPGGSLRLSCAASGFTFSNYWMNWVRQAPGKGLEWVANIKEDGGKKLYVDSVKGRFTISRDNAKN
SLFLQMNSLRAEDTAVYYCAREDTTLVVDYYYYGMDVWGQGTTVTVSSASTKGPSVFPLAPSSKSTSGGTAALGCLV
KDYFPEPVTVSWNSGALTSGVHTFPAVLQSSGLYSLSSVVTVPSSSLGTQTYICNVNHKPSNTKVDKKVEPKSCDKT
H
(30) 12850B
Fab Light Chain
(SEQ ID NO: 598)
EIVLTQSPGTLSLSPGERATLSCRASQSVSSSYLAWYQQKPGQAPRLLIYGASSRATGIPDRFSGSGSGTDFTLTIS
RLEPEDFAVYYCQQYGSSPWTFGQGTKVEIKRTVAAPSVFIFPPSDEQLKSGTASVVCLLNNFYPREAKVQWKVDNA
LQSGNSQESVTEQDSKDSTYSLSSTLTLSKADYEKHKVYACEVTHQGLSSPVTKSFNRGEC
Fab Heavy Chain
(SEQ ID NO: 599)
QVQLVQSGAEVKKPGSSVKVSCKASGGTFNTYAITWVRQAPGQGLEWMGGIIPISGIAEYAQKFQGRVTITTDDSST
TAYMELNSLRSEDTAVYYCASWNYALYYFYGMDVWGRGTTVTVSSASTKGPSVFPLAPSSKSTSGGTAALGCLVKDY
FPEPVTVSWNSGALTSGVHTFPAVLQSSGLYSLSSVVTVPSSSLGTQTYICNVNHKPSNTKVDKKVEPKSCDKTH
(31) 69261
Fab Light Chain
(SEQ ID NO: 600)
DIVMTQSPLSLPVTPGEPASISCRSSQSLLHSNGYNYLDWYLQKPGQSPQFLIYLGSNRASGVPDRFSGSGSGTDFT
LKINRVEAEDVGVYYCMQALQTPYTFGQGTKLEIKRTVAAPSVFIFPPSDEQLKSGTASVVCLLNNFYPREAKVQWK
VDNALQSGNSQESVTEQDSKDSTYSLSSTLTLSKADYEKHKVYACEVTHQGLSSPVTKSFNRGEC
Fab Heavy Chain
(SEQ ID NO: 601)
QVQLVESGGGLVKPGGSLRLSCAASGFTFSVYYMNWIRQAPGKGLEWVSYISSSGSTIYYADSVKGRFTISRDNAKN
SLYLQMNSLRAEDTAVYYCGREGYSGTYSYYGMDVWGQGTTVTVSSASTKGPSVFPLAPSSKSTSGGTAALGCLVKD
YFPEPVTVSWNSGALTSGVHTFPAVLQSSGLYSLSSVVTVPSSSLGTQTYICNVNHKPSNTKVDKKVEPKSCDKTH
(32) 69263
Fab Light Chain
(SEQ ID NO: 602)
DIQMTQSPSSLSASVGDRVTITCRASQDISHYSAWYQQKPGKLPNLLIYAASTLQSGVPSRFSGSGSGTDFSLTTSS
LQPEDVATYYCQKYNSVPLTFGGGTKVEIKRTVAAPSVFIFPPSDEQLKSGTASVVCLLNNFYPREAKVQWKVDNAL
QSGNSQESVTEQDSKDSTYSLSSTLTLSKADYEKHKVYACEVTHQGLSSPVTKSFNRGEC
Fab Heavy Chain
(SEQ ID NO: 603)
EVQLVESGGGLVQPGRSLRLSCAVSGFTFDDYAMHWVRQAPGKGLEWVSGISWNSGTRGYADSVKGRFTISRDNAKN
SLYLQMNSLRGEDTALYYCVKDITISPNYYGMDVWGQGTTVTVSSASTKGPSVFPLAPSSKSTSGGTAALGCLVKDY
FPEPVTVSWNSGALTSGVHTFPAVLQSSGLYSLSSVVTVPSSSLGTQTYICNVNHKPSNTKVDKKVEPKSCDKTH

[0262] In an embodiment, an anti-TfR antigen-binding protein, e.g., antibody or antigen-binding fragment (which may be tethered to a payload) comprises an IgG1 heavy chain constant domain comprising the sequence set forth in SEQ ID NO: 840: ASTKGPSVFPLAPSSKSTSGGTAALGCLVKDYFPEPVTVSWNSGALTSGVHTFPAVLQSSGLYSLSSVVTVPSSSLG TQTYICNVNHKPSNTKVDKKVEPKSCDKTHTCPPCPAPELLGGPSVFLFPPKPKDTLMISRTPEVTCVVVDVSHEDP EVKFNWYVDGVEVHNAKTKPREEQYNSTYRVVSVLTVLHQDWLNGKEYKCKVSNKALPAPIEKTISKAKGQPREPQV YTLPPSRDELTKNQVSLTCLVKGFYPSDIAVEWESNGQPENNYKTTPPVLDSDGSFFLYSKLTVDKSRWQQGNVFSC SVMHEALHNHYTQKSLSLSPGK (see, e.g., sequences of Table 4, or variants thereof). In an embodiment, an antigen-binding protein, e.g., antibody or antigen-binding fragment, comprises a light chain constant domain, e.g., of the type kappa or lambda. In an embodiment, a V_{H} as set forth herein is linked to a human heavy chain constant domain (e.g., IgG) and a V_{L} as set forth herein is linked to a human light chain constant domain (e.g., kappa). The present disclosure includes antigen-binding proteins comprising the variable domains set forth herein, which are linked to a heavy and/or light chain constant domain, e.g., as set forth herein.

TABLE 4
Heavy Chain Full hIgG1 Sequences.

| Identifier | HC Full hIgG1 sequence |
|---|---|
| 31874B | EVQLVESGGGLVQPGGSLRLSCAASGFAFSSYAMTWVRQAPGKGLEWVSVISGTGGSTYYADSVKG |
| | RFTISRDNSKNTLYLQMNSLRAEDTAVYYCAKGGAARRMEYFQYWGQGTLVTVSSASTKGPSVFPL |
| | APSSKSTSGGTAALGCLVKDYFPEPVTVSWNSGALTSGVHTFPAVLQSSGLYSLSSVVTVPSSSLG |
| | TQTYICNVNHKPSNTKVDKKVEPKSCDKTHTCPPCPAPELLGGPSVFLFPPKPKDTLMISRTPEVT |
| | CVVVDVSHEDPEVKFNWYVDGVEVHNAKTKPREEQYNSTYRVVSVLTVLHQDWLNGKEYKCKVSNK |
| | ALPAPIEKTISKAKGQPREPQVYTLPPSRDELTKNQVSLTCLVKGFYPSDIAVEWESNGQPENNYK |
| | TTPPVLDSDGSFFLYSKLTVDKSRWQQGNVFSCSVMHEALHNHYTQKSLSLSPGK (SEQ ID |
| | NO: 808) |
| 31863B | EVQLVESGGGLVQPGGSLRLSCAASGFTFNSYAMTWVRQAPGKGLEWVSFIGGSTGNTYYAGSVKG |
| | RFTISSDNSKKTLYLQMNSLRAEDTAVYYCAKGGAARRMEYFQHWGQGTLVTVSSASTKGPSVFPL |
| | APSSKSTSGGTAALGCLVKDYFPEPVTVSWNSGALTSGVHTFPAVLQSSGLYSLSSVVTVPSSSLG |
| | TQTYICNVNHKPSNTKVDKKVEPKSCDKTHTCPPCPAPELLGGPSVFLFPPKPKDTLMISRTPEVT |
| | CVVVDVSHEDPEVKFNWYVDGVEVHNAKTKPREEQYNSTYRVVSVLTVLHQDWLNGKEYKCKVSNK |
| | ALPAPIEKTISKAKGQPREPQVYTLPPSRDELTKNQVSLTCLVKGFYPSDIAVEWESNGQPENNYK |
| | TTPPVLDSDGSFFLYSKLTVDKSRWQQGNVFSCSVMHEALHNHYTQKSLSLSPGK (SEQ ID |
| | NO: 809) |
| 69348 | QVQLVESGGGVVQPGRSLRLSCAASGFTFTTYGMHWVRQAPGKGLEWVAVIWYDGSNKYYGDSVKG |
| | RFTISRDNSKNTLYLQMNSLRVDDTAVYYCTRTHGYTRSSDGFDYWGQGTLVTVSSASTKGPSVFP |
| | LAPSSKSTSGGTAALGCLVKDYFPEPVTVSWNSGALTSGVHTFPAVLQSSGLYSLSSVVTVPSSSL |
| | GTQTYICNVNHKPSNTKVDKKVEPKSCDKTHTCPPCPAPELLGGPSVFLFPPKPKDTLMISRTPEV |
| | TCVVVDVSHEDPEVKFNWYVDGVEVHNAKTKPREEQYNSTYRVVSVLTVLHQDWLNGKEYKCKVSN |
| | KALPAPIEKTISKAKGQPREPQVYTLPPSRDELTKNQVSLTCLVKGFYPSDIAVEWESNGQPENNY |
| | KTTPPVLDSDGSFFLYSKLTVDKSRWQQGNVFSCSVMHEALHNHYTQKSLSLSPGK (SEQ ID |
| | NO: 810) |
| 69340 | EVQLVESGGGLVQPGRSLRLSCAASGFTFDDKAMHWVRQVPGKGLEWISGISWNSGTIGYADSVKG |
| | RFIISRDNAKNSLYLQMNSLRAEDTALYYCAKDGDTSGWYWYGLDVWGQGTTVTVSSASTKGPSVF |
| | PLAPSSKSTSGGTAALGCLVKDYFPEPVTVSWNSGALTSGVHTFPAVLQSSGLYSLSSVVTVPSSS |
| | LGTQTYICNVNHKPSNTKVDKKVEPKSCDKTHTCPPCPAPELLGGPSVFLFPPKPKDTLMISRTPE |
| | VTCVVVDVSHEDPEVKFNWYVDGVEVHNAKTKPREEQYNSTYRVVSVLTVLHQDWLNGKEYKCKVS |
| | NKALPAPIEKTISKAKGQPREPQVYTLPPSRDELTKNQVSLTCLVKGFYPSDIAVEWESNGQPENN |
| | YKTTPPVLDSDGSFFLYSKLTVDKSRWQQGNVFSCSVMHEALHNHYTQKSLSLSPGK (SEQ ID |
| | NO: 811) |
| 69331 | QVQLVESGGGVVQPGRSLRLSCIASGFTFSVYGIHWVRQAPGKGLEWMAVISHDGNIKHYADSVKG |
| | RFTISRDNSKNTLYLQINSLRTEDTAVYYCAKDTWNSLDTFDIWGQGTMVTVSSASTKGPSVFPLA |
| | PSSKSTSGGTAALGCLVKDYFPEPVTVSWNSGALTSGVHTFPAVLQSSGLYSLSSVVTVPSSSLGT |
| | QTYICNVNHKPSNTKVDKKVEPKSCDKTHTCPPCPAPELLGGPSVFLFPPKPKDTLMISRTPEVTC |
| | VVVDVSHEDPEVKFNWYVDGVEVHNAKTKPREEQYNSTYRVVSVLTVLHQDWLNGKEYKCKVSNKA |
| | LPAPIEKTISKAKGQPREPQVYTLPPSRDELTKNQVSLTCLVKGFYPSDIAVEWESNGQPENNYKT |
| | TPPVLDSDGSFFLYSKLTVDKSRWQQGNVFSCSVMHEALHNHYTQKSLSLSPGK (SEQ ID NO: |
| | 812) |
| 69332 | QVTLRESGPALVKPSQTLTLTCTFSGFSLNTYGMFVSWIRQPPGKALEWLAHIHWDDDKYYSTSLK |
| | TRLTISKDTSKNQVVLTMTNMDPVDTATYYCARGHNNLNYIIHWGQGTLVTVSSASTKGPSVFPLA |
| | PSSKSTSGGTAALGCLVKDYFPEPVTVSWNSGALTSGVHTFPAVLQSSGLYSLSSVVTVPSSSLGT |
| | QTYICNVNHKPSNTKVDKKVEPKSCDKTHTCPPCPAPELLGGPSVFLFPPKPKDTLMISRTPEVTC |
| | VVVDVSHEDPEVKFNWYVDGVEVHNAKTKPREEQYNSTYRVVSVLTVLHQDWLNGKEYKCKVSNKA |
| | LPAPIEKTISKAKGQPREPQVYTLPPSRDELTKNQVSLTCLVKGFYPSDIAVEWESNGQPENNYKT |
| | TPPVLDSDGSFFLYSKLTVDKSRWQQGNVFSCSVMHEALHNHYTQKSLSLSPGK (SEQ ID NO: |
| | 813) |
| 69326 | EVQLVESGGGLVQPGGSLRLSCAVSGFIFSSYEMNWVRQAPGKGLEWVSYISSSGSTIFYADSVKG |
| | RFTISRDNAKNSLYLQMNSLRAEDTAVYYCVSGVVLFDVWGQGTMVTVSSASTKGPSVFPLAPSSK |
| | STSGGTAALGCLVKDYFPEPVTVSWNSGALTSGVHTFPAVLQSSGLYSLSSVVTVPSSSLGTQTYI |
| | CNVNHKPSNTKVDKKVEPKSCDKTHTCPPCPAPELLGGPSVFLFPPKPKDTLMISRTPEVTCVVVD |
| | VSHEDPEVKFNWYVDGVEVHNAKTKPREEQYNSTYRVVSVLTVLHQDWLNGKEYKCKVSNKALPAP |
| | IEKTISKAKGQPREPQVYTLPPSRDELTKNQVSLTCLVKGFYPSDIAVEWESNGQPENNYKTTPPV |
| | LDSDGSFFLYSKLTVDKSRWQQGNVFSCSVMHEALHNHYTQKSLSLSPGK (SEQ ID NO: |
| | 814) |
| 69329 | EVQLVESGGGLVQPGGSLRLSCAASGFTFSNYWMTWVRQAPGKGLEWVANIKEDGSEKDYVDSVKG |
| | RFTISRDNAKNSLYLQMNSLRGEDTAVYYCARDGEQLVDYYYYYVMDVWGQGTTVTVSSASTKGPS |
| | VFPLAPSSKSTSGGTAALGCLVKDYFPEPVTVSWNSGALTSGVHTFPAVLQSSGLYSLSSVVTVPS |
| | SSLGTQTYICNVNHKPSNTKVDKKVEPKSCDKTHTCPPCPAPELLGGPSVFLFPPKPKDTLMISRT |
| | PEVTCVVVDVSHEDPEVKFNWYVDGVEVHNAKTKPREEQYNSTYRVVSVLTVLHQDWLNGKEYKCK |
| | VSNKALPAPIEKTISKAKGQPREPQVYTLPPSRDELTKNQVSLTCLVKGFYPSDIAVEWESNGQPE |
| | NNYKTTPPVLDSDGSFFLYSKLTVDKSRWQQGNVFSCSVMHEALHNHYTQKSLSLSPGK (SEQ |
| | ID NO: 815) |
| 69323 | EVQLVESGGGLVQPGRSLRLSCAASGFTFDDYAMHWVRQAPGKGLEWVSGISWNSGYIGYADSVKG |
| | RFTISRDNAENSLHLQMNSLRAEDTALYYCARGGSTLVRGVKGGYYGMDVWGQGTTVTVSSASTKG |
| | PSVFPLAPSSKSTSGGTAALGCLVKDYFPEPVTVSWNSGALTSGVHTFPAVLQSSGLYSLSSVVTV |
| | PSSSLGTQTYICNVNHKPSNTKVDKKVEPKSCDKTHTCPPCPAPELLGGPSVFLFPPKPKDTLMIS |
| | RTPEVTCVVVDVSHEDPEVKFNWYVDGVEVHNAKTKPREEQYNSTYRVVSVLTVLHQDWLNGKEYK |
| | CKVSNKALPAPIEKTISKAKGQPREPQVYTLPPSRDELTKNQVSLTCLVKGFYPSDIAVEWESNGQ |
| | PENNYKTTPPVLDSDGSFFLYSKLTVDKSRWQQGNVFSCSVMHEALHNHYTQKSLSLSPGK (SEQ |
| | ID NO: 816) |
| 69305 | QVQLVESGGGVVQPGRSLRLSCAASGFTFSSYGMHWVRQAPGKGLEWVAVIWYDGSNKYYADSVKG |
| | RFTISRDISKNTLYLQMNSLRAEDTAVYYCAGQLDLFFDYWGQGTLVTVSSASTKGPSVFPLAPSS |
| | KSTSGGTAALGCLVKDYFPEPVTVSWNSGALTSGVHTFPAVLQSSGLYSLSSVVTVPSSSLGTQTY |
| | ICNVNHKPSNTKVDKKVEPKSCDKTHTCPPCPAPELLGGPSVFLFPPKPKDTLMISRTPEVTCVVV |
| | DVSHEDPEVKFNWYVDGVEVHNAKTKPREEQYNSTYRVVSVLTVLHQDWLNGKEYKCKVSNKALPA |
| | PIEKTISKAKGQPREPQVYTLPPSRDELTKNQVSLTCLVKGFYPSDIAVEWESNGQPENNYKTTPP |
| | VLDSDGSFFLYSKLTVDKSRWQQGNVFSCSVMHEALHNHYTQKSLSLSPGK (SEQ ID NO: |
| | 817) |
| 69307 | EVQLVESGGGLVQPGGSLRLSCTASGFTFSNYWMTWVRQAPGKGLEWVANIKEDGSEKEYVDSVKG |
| | RFTISRDNAKNSLYLQMNSLRGEDTAVYYCARDGEQLVDYYYYYVMDVWGQGTTVTVSSASTKGPS |
| | VFPLAPSSKSTSGGTAALGCLVKDYFPEPVTVSWNSGALTSGVHTFPAVLQSSGLYSLSSVVTVPS |
| | SSLGTQTYICNVNHKPSNTKVDKKVEPKSCDKTHTCPPCPAPELLGGPSVFLFPPKPKDTLMISRT |
| | PEVTCVVVDVSHEDPEVKFNWYVDGVEVHNAKTKPREEQYNSTYRVVSVLTVLHQDWLNGKEYKCK |
| | VSNKALPAPIEKTISKAKGQPREPQVYTLPPSRDELTKNQVSLTCLVKGFYPSDIAVEWESNGQPE |
| | NNYKTTPPVLDSDGSFFLYSKLTVDKSRWQQGNVFSCSVMHEALHNHYTQKSLSLSPGK (SEQ |
| | ID NO: 818) |
| 12795B | EVQLVESGGGLVQPGGSLRLSCATSGFTFTSYDMKWVRQAPGLGLEWVSAISGSGGNTYYADSVKG |
| | RFTISRDNSRNTLYLQMNSLRAEDTAVYYCTRSHDFGAFDYFDYWGQGTLVTVSSASTKGPSVFPL |
| | APSSKSTSGGTAALGCLVKDYFPEPVTVSWNSGALTSGVHTFPAVLQSSGLYSLSSVVTVPSSSLG |
| | TQTYICNVNHKPSNTKVDKKVEPKSCDKTHTCPPCPAPELLGGPSVFLFPPKPKDTLMISRTPEVT |
| | CVVVDVSHEDPEVKFNWYVDGVEVHNAKTKPREEQYNSTYRVVSVLTVLHQDWLNGKEYKCKVSNK |
| | ALPAPIEKTISKAKGQPREPQVYTLPPSRDELTKNQVSLTCLVKGFYPSDIAVEWESNGQPENNYK |
| | TTPPVLDSDGSFFLYSKLTVDKSRWQQGNVFSCSVMHEALHNHYTQKSLSLSPGK (SEQ ID |
| | NO: 819) |
| 12798B | EVQLVESGGDLVQPGRSLRLSCAASGFTFDDYAMHWVRQAPGKGLEWVSGISWNSATRVYADSVKG |
| | RFTISRDNAKNFLYLQMNSLRSEDTALYHCAKDMDISLGYYGLDVWGQGTTVTVSSASTKGPSVFP |
| | LAPSSKSTSGGTAALGCLVKDYFPEPVTVSWNSGALTSGVHTFPAVLQSSGLYSLSSVVTVPSSSL |
| | GTQTYICNVNHKPSNTKVDKKVEPKSCDKTHTCPPCPAPELLGGPSVFLFPPKPKDTLMISRTPEV |
| | TCVVVDVSHEDPEVKFNWYVDGVEVHNAKTKPREEQYNSTYRVVSVLTVLHQDWLNGKEYKCKVSN |
| | KALPAPIEKTISKAKGQPREPQVYTLPPSRDELTKNQVSLTCLVKGFYPSDIAVEWESNGQPENNY |
| | KTTPPVLDSDGSFFLYSKLTVDKSRWQQGNVFSCSVMHEALHNHYTQKSLSLSPGK (SEQ ID |
| | NO: 820) |
| 12799B | QITLKESGPTLVKPTQTLTLTCTFSGFSLSTSGVGVVWIRQPPGKALEWLALIYWNDHKRYSPSLG |
| | SRLTITKDTSKNQVVLTMTNMDPVDTATYYCAHYSGSYSYYYYGLDVWGQGTTVTVSSASTKGPSV |
| | FPLAPSSKSTSGGTAALGCLVKDYFPEPVTVSWNSGALTSGVHTFPAVLQSSGLYSLSSVVTVPSS |
| | SLGTQTYICNVNHKPSNTKVDKKVEPKSCDKTHTCPPCPAPELLGGPSVFLFPPKPKDTLMISRTP |
| | EVTCVVVDVSHEDPEVKFNWYVDGVEVHNAKTKPREEQYNSTYRVVSVLTVLHQDWLNGKEYKCKV |
| | SNKALPAPIEKTISKAKGQPREPQVYTLPPSRDELTKNQVSLTCLVKGFYPSDIAVEWESNGQPEN |
| | NYKTTPPVLDSDGSFFLYSKLTVDKSRWQQGNVFSCSVMHEALHNHYTQKSLSLSPGK (SEQ ID |
| | NO: 821) |
| 12801B | EVQLLESGGALVQPGGSLRLSCAASGFTFTSYAMHWVRQAPGKGLEWVSSIRGSGGGTYSADSVKG |
| | RFTISRDNSRDTLYLQMNSVRAEDTAVYYCARSHDYGAFDFFDYWGQGTLVTVSSASTKGPSVFPL |
| | APSSKSTSGGTAALGCLVKDYFPEPVTVSWNSGALTSGVHTFPAVLQSSGLYSLSSVVTVPSSSLG |
| | TQTYICNVNHKPSNTKVDKKVEPKSCDKTHTCPPCPAPELLGGPSVFLFPPKPKDTLMISRTPEVT |
| | CVVVDVSHEDPEVKFNWYVDGVEVHNAKTKPREEQYNSTYRVVSVLTVLHQDWLNGKEYKCKVSNK |
| | ALPAPIEKTISKAKGQPREPQVYTLPPSRDELTKNQVSLTCLVKGFYPSDIAVEWESNGQPENNYK |
| | TTPPVLDSDGSFFLYSKLTVDKSRWQQGNVFSCSVMHEALHNHYTQKSLSLSPGK (SEQ ID |
| | NO: 822) |
| 12802B | QVQLVESGGGLVKPGGSLRLSCAASGFTFSDYFMSWIRQAPGKGLEWVSYISSTGSTINYADSVKG |
| | RFTISRDNVKNSLYLQMTSLRVEDTAVYYCTRDNWNYEYWGQGTLVTVSSASTKGPSVFPLAPSSK |
| | STSGGTAALGCLVKDYFPEPVTVSWNSGALTSGVHTFPAVLQSSGLYSLSSVVTVPSSSLGTQTYI |
| | CNVNHKPSNTKVDKKVEPKSCDKTHTCPPCPAPELLGGPSVFLFPPKPKDTLMISRTPEVTCVVVD |
| | VSHEDPEVKFNWYVDGVEVHNAKTKPREEQYNSTYRVVSVLTVLHQDWLNGKEYKCKVSNKALPAP |
| | IEKTISKAKGQPREPQVYTLPPSRDELTKNQVSLTCLVKGFYPSDIAVEWESNGQPENNYKTTPPV |
| | LDSDGSFFLYSKLTVDKSRWQQGNVFSCSVMHEALHNHYTQKSLSLSPGK (SEQ ID NO: |
| | 823) |
| 12808B | QLQLQESGPGLVKPSETLSLTCTVSGESISSNTYYWGWIRQPPGKGLEWIGSIDYSGTTNYNPSLK |
| | SRVTISVDTSRNHFSLRLRSVTAADTAVYYCAREWGNYGYYYGMDVWGQGTTVTVSSASTKGPSVF |
| | PLAPSSKSTSGGTAALGCLVKDYFPEPVTVSWNSGALTSGVHTFPAVLQSSGLYSLSSVVTVPSSS |
| | LGTQTYICNVNHKPSNTKVDKKVEPKSCDKTHTCPPCPAPELLGGPSVFLFPPKPKDTLMISRTPE |
| | VTCVVVDVSHEDPEVKFNWYVDGVEVHNAKTKPREEQYNSTYRVVSVLTVLHQDWLNGKEYKCKVS |
| | NKALPAPIEKTISKAKGQPREPQVYTLPPSRDELTKNQVSLTCLVKGFYPSDIAVEWESNGQPENN |
| | YKTTPPVLDSDGSFFLYSKLTVDKSRWQQGNVFSCSVMHEALHNHYTQKSLSLSPGK (SEQ ID |
| | NO: 824) |
| 12812B | QVQLVQSGAEVKKPGSSVRVSCKASRGTFSSYAISWVRQAPGQGLEWMGGIIPIFGTANYAQKFLA |
| | RVTITADESTSTAYMELSSLRSEDTAVYYCAREKGWNYFDYWGQGTLVTVSSASTKGPSVFPLAPS |
| | SKSTSGGTAALGCLVKDYFPEPVTVSWNSGALTSGVHTFPAVLQSSGLYSLSSVVTVPSSSLGTQT |
| | YICNVNHKPSNTKVDKKVEPKSCDKTHTCPPCPAPELLGGPSVFLFPPKPKDTLMISRTPEVTCVV |
| | VDVSHEDPEVKFNWYVDGVEVHNAKTKPREEQYNSTYRVVSVLTVLHQDWLNGKEYKCKVSNKALP |
| | APIEKTISKAKGQPREPQVYTLPPSRDELTKNQVSLTCLVKGFYPSDIAVEWESNGQPENNYKTTP |
| | PVLDSDGSFFLYSKLTVDKSRWQQGNVFSCSVMHEALHNHYTQKSLSLSPGK (SEQ ID NO: |
| | 825) |
| 12816B | QVQLVESGGGLVKPGGSLRLSCAASGFTFSDYYMNWIRQAPGKGLEWVSYISSSGTTIYYADSVKG |
| | RFTISRDNAKKSLYLEMNSLRAEDTAVYYCAREGYGNDYYYYGIDVWGQGTTVTVSSASTKGPSVF |
| | PLAPSSKSTSGGTAALGCLVKDYFPEPVTVSWNSGALTSGVHTFPAVLQSSGLYSLSSVVTVPSSS |
| | LGTQTYICNVNHKPSNTKVDKKVEPKSCDKTHTCPPCPAPELLGGPSVFLFPPKPKDTLMISRTPE |
| | VTCVVVDVSHEDPEVKFNWYVDGVEVHNAKTKPREEQYNSTYRVVSVLTVLHQDWLNGKEYKCKVS |
| | NKALPAPIEKTISKAKGQPREPQVYTLPPSRDELTKNQVSLTCLVKGFYPSDIAVEWESNGQPENN |
| | YKTTPPVLDSDGSFFLYSKLTVDKSRWQQGNVFSCSVMHEALHNHYTQKSLSLSPGK (SEQ ID |
| | NO: 826) |
| 12833B | QVQLVESGGGVVQPGRSLRLSCAASGFTFSSFGMHWVRQAPGKGLEWVIFISYDGSDKYYADSVKG |
| | RFAISRDSSKNTLYLQMNSLRAEDTAVYYCAKENGILTDSYGMDVWGQGTTVTVSSASTKGPSVFP |
| | LAPSSKSTSGGTAALGCLVKDYFPEPVTVSWNSGALTSGVHTFPAVLQSSGLYSLSSVVTVPSSSL |
| | GTQTYICNVNHKPSNTKVDKKVEPKSCDKTHTCPPCPAPELLGGPSVFLFPPKPKDTLMISRTPEV |
| | TCVVVDVSHEDPEVKENWYVDGVEVHNAKTKPREEQYNSTYRVVSVLTVLHQDWLNGKEYKCKVSN |
| | KALPAPIEKTISKAKGQPREPQVYTLPPSRDELTKNQVSLTCLVKGFYPSDIAVEWESNGQPENNY |
| | KTTPPVLDSDGSFFLYSKLTVDKSRWQQGNVFSCSVMHEALHNHYTQKSLSLSPGK (SEQ ID |
| | NO: 827) |
| 12834B | QVQLVQSGAEVKKPGASVKVSCKASGYTFTSYGISWVRQAPGQGLEWMGWISVYHGNTNYAQKFQG |
| | RVTMTTDTSTSTAYMELRSLRSDDTAVYYCAREGYYDFWSGYYPFDYWGQGTLVTVSSASTKGPSV |
| | FPLAPSSKSTSGGTAALGCLVKDYFPEPVTVSWNSGALTSGVHTFPAVLQSSGLYSLSSVVTVPSS |
| | SLGTQTYICNVNHKPSNTKVDKKVEPKSCDKTHTCPPCPAPELLGGPSVFLFPPKPKDTLMISRTP |
| | EVTCVVVDVSHEDPEVKFNWYVDGVEVHNAKTKPREEQYNSTYRVVSVLTVLHQDWLNGKEYKCKV |
| | SNKALPAPIEKTISKAKGQPREPQVYTLPPSRDELTKNQVSLTCLVKGFYPSDIAVEWESNGQPEN |
| | NYKTTPPVLDSDGSFFLYSKLTVDKSRWQQGNVFSCSVMHEALHNHYTQKSLSLSPGK (SEQ ID |
| | NO: 828) |
| 12835B | EVQLVESGGGLIQPGGSLRLSCEASGFTFRNYEMNWVRQAPGKGLEWVSYISSSGNMKDYAESVKG |
| | RFTISRDNVKNSLQLQMNSLRVEDTAVYYCARDEFPYGMDVWGQGTTVTVSSASTKGPSVFPLAPS |
| | SKSTSGGTAALGCLVKDYFPEPVTVSWNSGALTSGVHTFPAVLQSSGLYSLSSVVTVPSSSLGTQT |
| | YICNVNHKPSNTKVDKKVEPKSCDKTHTCPPCPAPELLGGPSVFLFPPKPKDTLMISRTPEVTCVV |
| | VDVSHEDPEVKFNWYVDGVEVHNAKTKPREEQYNSTYRVVSVLTVLHQDWLNGKEYKCKVSNKALP |
| | APIEKTISKAKGQPREPQVYTLPPSRDELTKNQVSLTCLVKGFYPSDIAVEWESNGQPENNYKTTP |
| | PVLDSDGSFFLYSKLTVDKSRWQQGNVFSCSVMHEALHNHYTQKSLSLSPGK (SEQ ID NO: |
| | 829) |
| 12847B | EVQLVESGGGLVQPGRSLRLSCAASGFTFDDYAMNWVRQAPGKGLEWVSGISWSSGSMDYADSVKG |
| | RFTISRDNAKNSLYLQMNSLRTEDTALYYCAKAREVGDYYGMDVWGQGTTVTVSSASTKGPSVFPL |
| | APSSKSTSGGTAALGCLVKDYFPEPVTVSWNSGALTSGVHTFPAVLQSSGLYSLSSVVTVPSSSLG |
| | TQTYICNVNHKPSNTKVDKKVEPKSCDKTHTCPPCPAPELLGGPSVFLFPPKPKDTLMISRTPEVT |
| | CVVVDVSHEDPEVKFNWYVDGVEVHNAKTKPREEQYNSTYRVVSVLTVLHQDWLNGKEYKCKVSNK |
| | ALPAPIEKTISKAKGQPREPQVYTLPPSRDELTKNQVSLTCLVKGFYPSDIAVEWESNGQPENNYK |
| | TTPPVLDSDGSFFLYSKLTVDKSRWQQGNVFSCSVMHEALHNHYTQKSLSLSPGK (SEQ ID |
| | NO: 830) |
| 12848B | EVQLVESGGGLVQPGRSLTLSCAASGFTFDNFGMHWVRQGPGKGLEWVSGLTWNSGVIGYADSVKG |
| | RFTISRDNAKNSLYLQMNSLRPEDTALYYCAKDIRNYGPFDYWGQGTLVTVSSASTKGPSVFPLAP |
| | SSKSTSGGTAALGCLVKDYFPEPVTVSWNSGALTSGVHTFPAVLQSSGLYSLSSVVTVPSSSLGTQ |
| | TYICNVNHKPSNTKVDKKVEPKSCDKTHTCPPCPAPELLGGPSVFLFPPKPKDTLMISRTPEVTCV |
| | VVDVSHEDPEVKFNWYVDGVEVHNAKTKPREEQYNSTYRVVSVLTVLHQDWLNGKEYKCKVSNKAL |
| | PAPIEKTISKAKGQPREPQVYTLPPSRDELTKNQVSLTCLVKGFYPSDIAVEWESNGQPENNYKTT |
| | PPVLDSDGSFFLYSKLTVDKSRWQQGNVFSCSVMHEALHNHYTQKSLSLSPGK (SEQ ID NO: |
| | 831) |
| 12843B | EVQLVESGGGLVQPGGSLRLSCAASGFTFNIFEMNWVRQAPGKGLEWISYISSRGTTTYYADSVRG |
| | RFTISRDNAKNSLYLQMNSLRAEDTAVYYCARDYEATIPFDFWGQGTLVTVSSASTKGPSVFPLAP |
| | SSKSTSGGTAALGCLVKDYFPEPVTVSWNSGALTSGVHTFPAVLQSSGLYSLSSVVTVPSSSLGTQ |
| | TYICNVNHKPSNTKVDKKVEPKSCDKTHTCPPCPAPELLGGPSVFLFPPKPKDTLMISRTPEVTCV |
| | VVDVSHEDPEVKFNWYVDGVEVHNAKTKPREEQYNSTYRVVSVLTVLHQDWLNGKEYKCKVSNKAL |
| | PAPIEKTISKAKGQPREPQVYTLPPSRDELTKNQVSLTCLVKGFYPSDIAVEWESNGQPENNYKTT |
| | PPVLDSDGSFFLYSKLTVDKSRWQQGNVFSCSVMHEALHNHYTQKSLSLSPGK (SEQ ID NO: |
| | 832) |
| 12844B | EVQLVESGGSVVRPGGSLRLSCEASGFTFDDYGMSWVRQDPGKGLEWVSGINWNGDRTNYADSVKG |
| | RFIISRDNAKNSVYLQMNSLRAEDSALYHCARDQGLGVAATLDYWGQGTLVTVSSASTKGPSVFPL |
| | APSSKSTSGGTAALGCLVKDYFPEPVTVSWNSGALTSGVHTFPAVLQSSGLYSLSSVVTVPSSSLG |
| | TQTYICNVNHKPSNTKVDKKVEPKSCDKTHTCPPCPAPELLGGPSVFLFPPKPKDTLMISRTPEVT |
| | CVVVDVSHEDPEVKFNWYVDGVEVHNAKTKPREEQYNSTYRVVSVLTVLHQDWLNGKEYKCKVSNK |
| | ALPAPIEKTISKAKGQPREPQVYTLPPSRDELTKNQVSLTCLVKGFYPSDIAVEWESNGQPENNYK |
| | TTPPVLDSDGSFFLYSKLTVDKSRWQQGNVFSCSVMHEALHNHYTQKSLSLSPGK (SEQ ID |
| | NO: 833) |
| 12845B | EVQLVESGGGLVQPGGSLRLSCAASGFTVSNYEMNWVRQAPGKGLEWVSYISSSTSNIYYADSVKG |
| | RFTISRDNAENSLYLQMNSLRVEDTAVYYCVRDGIVVVPVGRGYYYYGLDVWGQGTTVTVSSASTK |
| | GPSVFPLAPSSKSTSGGTAALGCLVKDYFPEPVTVSWNSGALTSGVHTFPAVLQSSGLYSLSSVVT |
| | VPSSSLGTQTYICNVNHKPSNTKVDKKVEPKSCDKTHTCPPCPAPELLGGPSVFLFPPKPKDTLMI |
| | SRTPEVTCVVVDVSHEDPEVKFNWYVDGVEVHNAKTKPREEQYNSTYRVVSVLTVLHQDWLNGKEY |
| | KCKVSNKALPAPIEKTISKAKGQPREPQVYTLPPSRDELTKNQVSLTCLVKGFYPSDIAVEWESNG |
| | QPENNYKTTPPVLDSDGSFFLYSKLTVDKSRWQQGNVFSCSVMHEALHNHYTQKSLSLSPGK |
| | (SEQ ID NO: 834) |
| 12839B | QVQLVESGGGVVQPGRSLRLSCAASGFPFSNYVMYWVRQAPGKGLEWVALIFFDGKKNYHADSVKG |
| | RFTITRDNSKNMLYLQMNSLRPEDAAVYYCAKIHCPNGVCYKGYYGMDVWGQGTTVTVSSASTKGP |
| | SVFPLAPSSKSTSGGTAALGCLVKDYFPEPVTVSWNSGALTSGVHTFPAVLQSSGLYSLSSVVTVP |
| | SSSLGTQTYICNVNHKPSNTKVDKKVEPKSCDKTHTCPPCPAPELLGGPSVFLFPPKPKDTLMISR |
| | TPEVTCVVVDVSHEDPEVKFNWYVDGVEVHNAKTKPREEQYNSTYRVVSVLTVLHQDWLNGKEYKC |
| | KVSNKALPAPIEKTISKAKGQPREPQVYTLPPSRDELTKNQVSLTCLVKGFYPSDIAVEWESNGQP |
| | ENNYKTTPPVLDSDGSFFLYSKLTVDKSRWQQGNVFSCSVMHEALHNHYTQKSLSLSPGK (SEQ |
| | ID NO: 835) |
| 12841B | EVQLVESGGGLVQPGGSLRLSCAASGFTFSNYWMNWVRQAPGKGLEWVANIKEDGGKKLYVDSVKG |
| | RFTISRDNAKNSLFLQMNSLRAEDTAVYYCAREDTTLVVDYYYYGMDVWGQGTTVTVSSASTKGPS |
| | VFPLAPSSKSTSGGTAALGCLVKDYFPEPVTVSWNSGALTSGVHTFPAVLQSSGLYSLSSVVTVPS |
| | SSLGTQTYICNVNHKPSNTKVDKKVEPKSCDKTHTCPPCPAPELLGGPSVFLFPPKPKDTLMISRT |
| | PEVTCVVVDVSHEDPEVKFNWYVDGVEVHNAKTKPREEQYNSTYRVVSVLTVLHQDWLNGKEYKCK |
| | VSNKALPAPIEKTISKAKGQPREPQVYTLPPSRDELTKNQVSLTCLVKGFYPSDIAVEWESNGQPE |
| | NNYKTTPPVLDSDGSFFLYSKLTVDKSRWQQGNVFSCSVMHEALHNHYTQKSLSLSPGK (SEQ |
| | ID NO: 836) |
| 12850B | QVQLVQSGAEVKKPGSSVKVSCKASGGTFNTYAITWVRQAPGQGLEWMGGIIPISGIAEYAQKFQG |
| | RVTITTDDSSTTAYMELNSLRSEDTAVYYCASWNYALYYFYGMDVWGRGTTVTVSSASTKGPSVFP |
| | LAPSSKSTSGGTAALGCLVKDYFPEPVTVSWNSGALTSGVHTFPAVLQSSGLYSLSSVVTVPSSSL |
| | GTQTYICNVNHKPSNTKVDKKVEPKSCDKTHTCPPCPAPELLGGPSVFLFPPKPKDTLMISRTPEV |
| | TCVVVDVSHEDPEVKFNWYVDGVEVHNAKTKPREEQYNSTYRVVSVLTVLHQDWLNGKEYKCKVSN |
| | KALPAPIEKTISKAKGQPREPQVYTLPPSRDELTKNQVSLTCLVKGFYPSDIAVEWESNGQPENNY |
| | KTTPPVLDSDGSFFLYSKLTVDKSRWQQGNVFSCSVMHEALHNHYTQKSLSLSPGK (SEQ ID |
| | NO: 837) |
| 69261 | QVQLVESGGGLVKPGGSLRLSCAASGFTFSVYYMNWIRQAPGKGLEWVSYISSSGSTIYYADSVKG |
| | RFTISRDNAKNSLYLQMNSLRAEDTAVYYCGREGYSGTYSYYGMDVWGQGTTVTVSSASTKGPSVF |
| | PLAPSSKSTSGGTAALGCLVKDYFPEPVTVSWNSGALTSGVHTFPAVLQSSGLYSLSSVVTVPSSS |
| | LGTQTYICNVNHKPSNTKVDKKVEPKSCDKTHTCPPCPAPELLGGPSVFLFPPKPKDTLMISRTPE |
| | VTCVVVDVSHEDPEVKFNWYVDGVEVHNAKTKPREEQYNSTYRVVSVLTVLHQDWLNGKEYKCKVS |
| | NKALPAPIEKTISKAKGQPREPQVYTLPPSRDELTKNQVSLTCLVKGFYPSDIAVEWESNGQPENN |
| | YKTTPPVLDSDGSFFLYSKLTVDKSRWQQGNVFSCSVMHEALHNHYTQKSLSLSPGK (SEQ ID |
| | NO: 838) |
| 69263 | EVQLVESGGGLVQPGRSLRLSCAVSGFTFDDYAMHWVRQAPGKGLEWVSGISWNSGTRGYADSVKG |
| | RFTISRDNAKNSLYLQMNSLRGEDTALYYCVKDITISPNYYGMDVWGQGTTVTVSSASTKGPSVFP |
| | LAPSSKSTSGGTAALGCLVKDYFPEPVTVSWNSGALTSGVHTFPAVLQSSGLYSLSSVVTVPSSSL |
| | GTQTYICNVNHKPSNTKVDKKVEPKSCDKTHTCPPCPAPELLGGPSVFLFPPKPKDTLMISRTPEV |
| | TCVVVDVSHEDPEVKFNWYVDGVEVHNAKTKPREEQYNSTYRVVSVLTVLHQDWLNGKEYKCKVSN |
| | KALPAPIEKTISKAKGQPREPQVYTLPPSRDELTKNQVSLTCLVKGFYPSDIAVEWESNGQPENNY |
| | KTTPPVLDSDGSFFLYSKLTVDKSRWQQGNVFSCSVMHEALHNHYTQKSLSLSPGK (SEQ ID |
| | NO: 839) |

[0263] As discussed, an anti-hTfR:GAA scFv fusion protein (e.g., 31874B; 31863B; 69348; 69340; 69331; 69332; 69326; 69329; 69323; 69305; 69307; 12795B; 12798B; 12799B; 12801B; 12802B; 12808B; 12812B; 12816B; 12833B; 12834B; 12835B; 12847B; 12848B; 12843B; 12844B; 12845B; 12839B; 12841B; 12850B; 69261; or 69263) comprises an optional signal peptide, connected to an scFv (e.g., including a V_{L} and a V_{H} optionally connected by a linker), connected to an option linker, connected to a GAA polypeptide. For example, the optional signal peptide can be the signal peptide from Mus musculus Ror1 (e.g., consisting of the amino acids M4HRPRRRGTRPPPLALLAALLLAARGADA (SEQ ID NO: 610).

[0264] In a particular multidomain therapeutic protein, the TfR-binding delivery domain is an anti-TfR scFv. For example, the scFv can include a V_{L} and a V_{H} optionally connected by a linker.

[0265] In one example, the anti-hTfR antibody or antigen-binding fragment thereof or scFv can comprise: (i) a heavy chain variable region that comprises the HCDR1, HCDR2 and HCDR3 of a HCVR comprising the amino acid sequence set forth in SEQ ID NO: 171, 680, 181, 681, 191, 682, 201, 211, 221, 685, 231, 687, 241, 689, 251, 261, 691, 271, 281, 692, 291, 301, 311, 694, 321, 331, 696, 341, 351, 697, 361, 699, 371, 700, 381, 391, 401, 411, 421, 701, 431, 441, 451, 461, 471, 702, or 481; and/or (ii) a light chain variable region that comprises the LCDR1, LCDR2 and LCDR3 of a LCVR comprising the amino acid sequence set forth in SEQ ID NO: 176, 186, 196, 206, 683, 216, 684, 226, 686, 236, 688, 246, 690, 256, 266, 276, 286, 693, 296, 306, 316, 695, 326, 336, 346, 356, 698, 366, 376, 386, 396, 406, 416, 426, 436, 446, 456, 466, 476, 632, 486, or 703.

[0266] In another example, the anti-TfR antibody or antigen-binding fragment thereof or scFv can comprise: (1) a HCVR comprising the HCDR1, HCDR2 and HCDR3 of a HCVR that comprises the amino acid sequence set forth in SEQ ID NO: 171 or 680 (or a variant thereof); and a LCVR comprising the LCDR1, LCDR2 and LCDR3 of a LCVR that comprises the amino acid sequence set forth in SEQ ID NO: 176 (or a variant thereof); (2) a HCVR comprising the HCDR1, HCDR2 and HCDR3 of a HCVR that comprises the amino acid sequence set forth in SEQ ID NO: 181 or 681 (or a variant thereof); and a LCVR comprising the LCDR1, LCDR2 and LCDR3 of a LCVR that comprises the amino acid sequence set forth in SEQ ID NO: 186 (or a variant thereof); (3) a HCVR comprising the HCDR1, HCDR2 and HCDR3 of a HCVR that comprises the amino acid sequence set forth in SEQ ID NO: 191 or 682 (or a variant thereof); and a LCVR comprising the LCDR1, LCDR2 and LCDR3 of a LCVR that comprises the amino acid sequence set forth in SEQ ID NO: 196 (or a variant thereof); (4) a HCVR comprising the HCDR1, HCDR2 and HCDR3 of a HCVR that comprises the amino acid sequence set forth in SEQ ID NO: 201 (or a variant thereof); and a LCVR comprising the LCDR1, LCDR2 and LCDR3 of a LCVR that comprises the amino acid sequence set forth in SEQ ID NO: 206 or 683 (or a variant thereof); (5) a HCVR comprising the HCDR1, HCDR2 and HCDR3 of a HCVR that comprises the amino acid sequence set forth in SEQ ID NO: 211 (or a variant thereof); and a LCVR comprising the LCDR1, LCDR2 and LCDR3 of a LCVR that comprises the amino acid sequence set forth in SEQ ID NO: 216 or 684 (or a variant thereof); (6) a HCVR comprising the HCDR1, HCDR2 and HCDR3 of a HCVR that comprises the amino acid sequence set forth in SEQ ID NO: 221 or 685 (or a variant thereof); and a LCVR comprising the LCDR1, LCDR2 and LCDR3 of a LCVR that comprises the amino acid sequence set forth in SEQ ID NO: 226 or 686 (or a variant thereof); (7) a HCVR comprising the HCDR1, HCDR2 and HCDR3 of a HCVR that comprises the amino acid sequence set forth in SEQ ID NO: 231 or 687 (or a variant thereof); and a LCVR comprising the LCDR1, LCDR2 and LCDR3 of a LCVR that comprises the amino acid sequence set forth in SEQ ID NO: 236 or 688 (or a variant thereof); (8) a HCVR comprising the HCDR1, HCDR2 and HCDR3 of a HCVR that comprises the amino acid sequence set forth in SEQ ID NO: 241 or 689 (or a variant thereof); and a LCVR comprising the LCDR1, LCDR2 and LCDR3 of a LCVR that comprises the amino acid sequence set forth in SEQ ID NO: 246 or 690 (or a variant thereof); (9) a HCVR comprising the HCDR1, HCDR2 and HCDR3 of a HCVR that comprises the amino acid sequence set forth in SEQ ID NO: 251 (or a variant thereof); and a LCVR comprising the LCDR1, LCDR2 and LCDR3 of a LCVR that comprises the amino acid sequence set forth in SEQ ID NO: 256 (or a variant thereof); (10) a HCVR comprising the HCDR1, HCDR2 and HCDR3 of a HCVR that comprises the amino acid sequence set forth in SEQ ID NO: 261 or 691 (or a variant thereof); and a LCVR comprising the LCDR1, LCDR2 and LCDR3 of a LCVR that comprises the amino acid sequence set forth in SEQ ID NO: 266 (or a variant thereof); (11) a HCVR comprising the HCDR1, HCDR2 and HCDR3 of a HCVR that comprises the amino acid sequence set forth in SEQ ID NO: 271 (or a variant thereof); and a LCVR comprising the LCDR1, LCDR2 and LCDR3 of a LCVR that comprises the amino acid sequence set forth in SEQ ID NO: 276 (or a variant thereof); (12) a HCVR comprising the HCDR1, HCDR2 and HCDR3 of a HCVR that comprises the amino acid sequence set forth in SEQ ID NO: 281 or 692 (or a variant thereof); and a LCVR comprising the LCDR1, LCDR2 and LCDR3 of a LCVR that comprises the amino acid sequence set forth in SEQ ID NO: 286 or 693 (or a variant thereof); (13) a HCVR comprising the HCDR1, HCDR2 and HCDR3 of a HCVR that comprises the amino acid sequence set forth in SEQ ID NO: 291 (or a variant thereof); and a LCVR comprising the LCDR1, LCDR2 and LCDR3 of a LCVR that comprises the amino acid sequence set forth in SEQ ID NO: 296 (or a variant thereof); (14) a HCVR comprising the HCDR1, HCDR2 and HCDR3 of a HCVR that comprises the amino acid sequence set forth in SEQ ID NO: 301 (or a variant thereof); and a LCVR comprising the LCDR1, LCDR2 and LCDR3 of a LCVR that comprises the amino acid sequence set forth in SEQ ID NO: 306 (or a variant thereof); (15) a HCVR comprising the HCDR1, HCDR2 and HCDR3 of a HCVR that comprises the amino acid sequence set forth in SEQ ID NO: 311 or 694 (or a variant thereof); and a LCVR comprising the LCDR1, LCDR2 and LCDR3 of a LCVR that comprises the amino acid sequence set forth in SEQ ID NO: 316 or 695 (or a variant thereof); (16) a HCVR comprising the HCDR1, HCDR2 and HCDR3 of a HCVR that comprises the amino acid sequence set forth in SEQ ID NO: 321 (or a variant thereof); and a LCVR comprising the LCDR1, LCDR2 and LCDR3 of a LCVR that comprises the amino acid sequence set forth in SEQ ID NO: 326 (or a variant thereof); (17) a HCVR comprising the HCDR1, HCDR2 and HCDR3 of a HCVR that comprises the amino acid sequence set forth in SEQ ID NO: 331 or 696 (or a variant thereof); and a LCVR comprising the LCDR1, LCDR2 and LCDR3 of a LCVR that comprises the amino acid sequence set forth in SEQ ID NO: 336 (or a variant thereof); (18) a HCVR comprising the HCDR1, HCDR2 and HCDR3 of a HCVR that comprises the amino acid sequence set forth in SEQ ID NO: 341 (or a variant thereof); and a LCVR comprising the LCDR1, LCDR2 and LCDR3 of a LCVR that comprises the amino acid sequence set forth in SEQ ID NO: 346 (or a variant thereof); (19) a HCVR comprising the HCDR1, HCDR2 and HCDR3 of a HCVR that comprises the amino acid sequence set forth in SEQ ID NO: 351 or 697 (or a variant thereof); and a LCVR comprising the LCDR1, LCDR2 and LCDR3 of a LCVR that comprises the amino acid sequence set forth in SEQ ID NO: 356 or 698 (or a variant thereof); (20) a HCVR comprising the HCDR1, HCDR2 and HCDR3 of a HCVR that comprises the amino acid sequence set forth in SEQ ID NO: 361 or 699 (or a variant thereof); and a LCVR comprising the LCDR1, LCDR2 and LCDR3 of a LCVR that comprises the amino acid sequence set forth in SEQ ID NO: 366 (or a variant thereof); (21) a HCVR comprising the HCDR1, HCDR2 and HCDR3 of a HCVR that comprises the amino acid sequence set forth in SEQ ID NO: 371 or 700 (or a variant thereof); and a LCVR comprising the LCDR1, LCDR2 and LCDR3 of a LCVR that comprises the amino acid sequence set forth in SEQ ID NO: 376 (or a variant thereof); (22) a HCVR comprising the HCDR1, HCDR2 and HCDR3 of a HCVR that comprises the amino acid sequence set forth in SEQ ID NO: 381 (or a variant thereof); and a LCVR comprising the LCDR1, LCDR2 and LCDR3 of a LCVR that comprises the amino acid sequence set forth in SEQ ID NO: 386 (or a variant thereof); (23) a HCVR comprising the HCDR1, HCDR2 and HCDR3 of a HCVR that comprises the amino acid sequence set forth in SEQ ID NO: 391 (or a variant thereof); and a LCVR comprising the LCDR1, LCDR2 and LCDR3 of a LCVR that comprises the amino acid sequence set forth in SEQ ID NO: 396 (or a variant thereof); (24) a HCVR comprising the HCDR1, HCDR2 and HCDR3 of a HCVR that comprises the amino acid sequence set forth in SEQ ID NO: 401 (or a variant thereof); and a LCVR comprising the LCDR1, LCDR2 and LCDR3 of a LCVR that comprises the amino acid sequence set forth in SEQ ID NO: 406 (or a variant thereof); (25) a HCVR comprising the HCDR1, HCDR2 and HCDR3 of a HCVR that comprises the amino acid sequence set forth in SEQ ID NO: 411 (or a variant thereof); and a LCVR comprising the LCDR1, LCDR2 and LCDR3 of a LCVR that comprises the amino acid sequence set forth in SEQ ID NO: 416 (or a variant thereof); (26) a HCVR comprising the HCDR1, HCDR2 and HCDR3 of a HCVR that comprises the amino acid sequence set forth in SEQ ID NO: 421 or 701 (or a variant thereof); and a LCVR comprising the LCDR1, LCDR2 and LCDR3 of a LCVR that comprises the amino acid sequence set forth in SEQ ID NO: 426 (or a variant thereof); (27) a HCVR comprising the HCDR1, HCDR2 and HCDR3 of a HCVR that comprises the amino acid sequence set forth in SEQ ID NO: 431 (or a variant thereof); and a LCVR comprising the LCDR1, LCDR2 and LCDR3 of a LCVR that comprises the amino acid sequence set forth in SEQ ID NO: 436 (or a variant thereof); (28) a HCVR comprising the HCDR1, HCDR2 and HCDR3 of a HCVR that comprises the amino acid sequence set forth in SEQ ID NO: 441 (or a variant thereof); and a LCVR comprising the LCDR1, LCDR2 and LCDR3 of a LCVR that comprises the amino acid sequence set forth in SEQ ID NO: 446 (or a variant thereof); (29) a HCVR comprising the HCDR1, HCDR2 and HCDR3 of a HCVR that comprises the amino acid sequence set forth in SEQ ID NO: 451 (or a variant thereof); and a LCVR comprising the LCDR1, LCDR2 and LCDR3 of a LCVR that comprises the amino acid sequence set forth in SEQ ID NO: 456 (or a variant thereof); (30) a HCVR comprising the HCDR1, HCDR2 and HCDR3 of a HCVR that comprises the amino acid sequence set forth in SEQ ID NO: 461 (or a variant thereof); and a LCVR comprising the LCDR1, LCDR2 and LCDR3 of a LCVR that comprises the amino acid sequence set forth in SEQ ID NO: 466 (or a variant thereof); (31) a HCVR comprising the HCDR1, HCDR2 and HCDR3 of a HCVR that comprises the amino acid sequence set forth in SEQ ID NO: 471 or 702 (or a variant thereof); and a LCVR comprising the LCDR1, LCDR2 and LCDR3 of a LCVR that comprises the amino acid sequence set forth in SEQ ID NO: 476 or 632 (or a variant thereof); or (32) a HCVR comprising the HCDR1, HCDR2 and HCDR3 of a HCVR that comprises the amino acid sequence set forth in SEQ ID NO: 481 (or a variant thereof); and a LCVR comprising the LCDR1, LCDR2 and LCDR3 of a LCVR that comprises the amino acid sequence set forth in SEQ ID NO: 486 or 703 (or a variant thereof). A variant refers to a polypeptide comprising an amino acid sequence that is at least about 70-99.9% (e.g., 70, 72, 74, 75, 76, 79, 80, 81, 82, 83, 84, 85, 86, 87, 88, 89, 90, 91, 92, 93, 94, 95, 96, 97, 98, 99, 99.5, 99.9%) identical or similar to a referenced amino acid sequence that is set forth herein.

[0267] In another example, the anti-TfR antibody or antigen-binding fragment thereof or scFv can comprise: (23) a HCVR comprising the HCDR1, HCDR2 and HCDR3 of a HCVR that comprises the amino acid sequence set forth in SEQ ID NO: 391 (or a variant thereof); and a LCVR comprising the LCDR1, LCDR2 and LCDR3 of a LCVR that comprises the amino acid sequence set forth in SEQ ID NO: 396 (or a variant thereof); or (25) a HCVR comprising the HCDR1, HCDR2 and HCDR3 of a HCVR that comprises the amino acid sequence set forth in SEQ ID NO: 411 (or a variant thereof); and a LCVR comprising the LCDR1, LCDR2 and LCDR3 of a LCVR that comprises the amino acid sequence set forth in SEQ ID NO: 416 (or a variant thereof). In another example, the anti-TfR antibody or antigen-binding fragment thereof or scFv can comprise a HCVR comprising the HCDR1, HCDR2 and HCDR3 of a HCVR that comprises the amino acid sequence set forth in SEQ ID NO: 391 (or a variant thereof); and a LCVR comprising the LCDR1, LCDR2 and LCDR3 of a LCVR that comprises the amino acid sequence set forth in SEQ ID NO: 396 (or a variant thereof). In another example, the anti-TfR antibody or antigen-binding fragment thereof or scFv can comprise a HCVR comprising the HCDR1, HCDR2 and HCDR3 of a HCVR that comprises the amino acid sequence set forth in SEQ ID NO: 411 (or a variant thereof); and a LCVR comprising the LCDR1, LCDR2 and LCDR3 of a LCVR that comprises the amino acid sequence set forth in SEQ ID NO: 416 (or a variant thereof).

[0268] In another example, the anti-TfR antibody or antigen-binding fragment thereof or scFv can comprise: (a) a HCVR that comprises: an HCDR1 comprising the amino acid sequence set forth in SEQ ID NO: 172 (or a variant thereof), an HCDR2 comprising the amino acid sequence set forth in SEQ ID NO: 173 (or a variant thereof), and an HCDR3 comprising the amino acid sequence set forth in SEQ ID NO: 174 (or a variant thereof); and a LCVR that comprises: an LCDR1 comprising the amino acid sequence set forth in SEQ ID NO: 177 (or a variant thereof), an LCDR2 comprising the amino acid sequence set forth in SEQ ID NO: 178 (or a variant thereof), and an LCDR3 comprising the amino acid sequence set forth in SEQ ID NO: 179 (or a variant thereof); (b) a HCVR that comprises: an HCDR1 comprising the amino acid sequence set forth in SEQ ID NO: 182 (or a variant thereof), an HCDR2 comprising the amino acid sequence set forth in SEQ ID NO: 183 (or a variant thereof), and an HCDR3 comprising the amino acid sequence set forth in SEQ ID NO: 184 (or a variant thereof); and a LCVR that comprises: an LCDR1 comprising the amino acid sequence set forth in SEQ ID NO: 187 (or a variant thereof), an LCDR2 comprising the amino acid sequence set forth in SEQ ID NO: 188 (or a variant thereof), and an LCDR3 comprising the amino acid sequence set forth in SEQ ID NO: 189 (or a variant thereof); (c) a HCVR that comprises: an HCDR1 comprising the amino acid sequence set forth in SEQ ID NO: 192 (or a variant thereof), an HCDR2 comprising the amino acid sequence set forth in SEQ ID NO: 193 (or a variant thereof), and an HCDR3 comprising the amino acid sequence set forth in SEQ ID NO: 194 (or a variant thereof); and a LCVR that comprises: an LCDR1 comprising the amino acid sequence set forth in SEQ ID NO: 197 (or a variant thereof), an LCDR2 comprising the amino acid sequence set forth in SEQ ID NO: 198 (or a variant thereof), and an LCDR3 comprising the amino acid sequence set forth in SEQ ID NO: 199 (or a variant thereof); (d) a HCVR that comprises: an HCDR1 comprising the amino acid sequence set forth in SEQ ID NO: 202 (or a variant thereof), an HCDR2 comprising the amino acid sequence set forth in SEQ ID NO: 203 (or a variant thereof), and an HCDR3 comprising the amino acid sequence set forth in SEQ ID NO: 204 (or a variant thereof); and a LCVR that comprises: an LCDR1 comprising the amino acid sequence set forth in SEQ ID NO: 207 (or a variant thereof), an LCDR2 comprising the amino acid sequence set forth in SEQ ID NO: 208 (or a variant thereof), and an LCDR3 comprising the amino acid sequence set forth in SEQ ID NO: 209 (or a variant thereof); (e) a HCVR that comprises: an HCDR1 comprising the amino acid sequence set forth in SEQ ID NO: 212 (or a variant thereof), an HCDR2 comprising the amino acid sequence set forth in SEQ ID NO: 213 (or a variant thereof), and an HCDR3 comprising the amino acid sequence set forth in SEQ ID NO: 214 (or a variant thereof); and a LCVR that comprises: an LCDR1 comprising the amino acid sequence set forth in SEQ ID NO: 217 (or a variant thereof), an LCDR2 comprising the amino acid sequence set forth in SEQ ID NO: 218 (or a variant thereof), and an LCDR3 comprising the amino acid sequence set forth in SEQ ID NO: 219 (or a variant thereof); (f) a HCVR that comprises: an HCDR1 comprising the amino acid sequence set forth in SEQ ID NO: 222 (or a variant thereof), an HCDR2 comprising the amino acid sequence set forth in SEQ ID NO: 223 (or a variant thereof), and an HCDR3 comprising the amino acid sequence set forth in SEQ ID NO: 224 (or a variant thereof); and a LCVR that comprises: an LCDR1 comprising the amino acid sequence set forth in SEQ ID NO: 227 (or a variant thereof), an LCDR2 comprising the amino acid sequence set forth in SEQ ID NO: 228 (or a variant thereof), and an LCDR3 comprising the amino acid sequence set forth in SEQ ID NO: 229 (or a variant thereof); (g) a HCVR that comprises: an HCDR1 comprising the amino acid sequence set forth in SEQ ID NO: 232 (or a variant thereof), an HCDR2 comprising the amino acid sequence set forth in SEQ ID NO: 233 (or a variant thereof), and an HCDR3 comprising the amino acid sequence set forth in SEQ ID NO: 234 (or a variant thereof); and a LCVR that comprises: an LCDR1 comprising the amino acid sequence set forth in SEQ ID NO: 237 (or a variant thereof), an LCDR2 comprising the amino acid sequence set forth in SEQ ID NO: 238 (or a variant thereof), and an LCDR3 comprising the amino acid sequence set forth in SEQ ID NO: 239 (or a variant thereof); (h) a HCVR that comprises: an HCDR1 comprising the amino acid sequence set forth in SEQ ID NO: 242 (or a variant thereof), an HCDR2 comprising the amino acid sequence set forth in SEQ ID NO: 243 (or a variant thereof), and an HCDR3 comprising the amino acid sequence set forth in SEQ ID NO: 244 (or a variant thereof); and a LCVR that comprises: an LCDR1 comprising the amino acid sequence set forth in SEQ ID NO: 247 (or a variant thereof), an LCDR2 comprising the amino acid sequence set forth in SEQ ID NO: 248 (or a variant thereof), and an LCDR3 comprising the amino acid sequence set forth in SEQ ID NO: 249 (or a variant thereof); (i) a HCVR that comprises: an HCDR1 comprising the amino acid sequence set forth in SEQ ID NO: 252 (or a variant thereof), an HCDR2 comprising the amino acid sequence set forth in SEQ ID NO: 253 (or a variant thereof), and an HCDR3 comprising the amino acid sequence set forth in SEQ ID NO: 254 (or a variant thereof); and a LCVR that comprises: an LCDR1 comprising the amino acid sequence set forth in SEQ ID NO: 257 (or a variant thereof), an LCDR2 comprising the amino acid sequence set forth in SEQ ID NO: 258 (or a variant thereof), and an LCDR3 comprising the amino acid sequence set forth in SEQ ID NO: 259 (or a variant thereof); (j) a HCVR that comprises: an HCDR1 comprising the amino acid sequence set forth in SEQ ID NO: 262 (or a variant thereof), an HCDR2 comprising the amino acid sequence set forth in SEQ ID NO: 263 (or a variant thereof), and an HCDR3 comprising the amino acid sequence set forth in SEQ ID NO: 264 (or a variant thereof); and a LCVR that comprises: an LCDR1 comprising the amino acid sequence set forth in SEQ ID NO: 267 (or a variant thereof), an LCDR2 comprising the amino acid sequence set forth in SEQ ID NO: 268 (or a variant thereof), and an LCDR3 comprising the amino acid sequence set forth in SEQ ID NO: 269 (or a variant thereof); (k) a HCVR that comprises: an HCDR1 comprising the amino acid sequence set forth in SEQ ID NO: 272 (or a variant thereof), an HCDR2 comprising the amino acid sequence set forth in SEQ ID NO: 273 (or a variant thereof), and an HCDR3 comprising the amino acid sequence set forth in SEQ ID NO: 274 (or a variant thereof); and a LCVR that comprises: an LCDR1 comprising the amino acid sequence set forth in SEQ ID NO: 277 (or a variant thereof), an LCDR2 comprising the amino acid sequence set forth in SEQ ID NO: 278 (or a variant thereof), and an LCDR3 comprising the amino acid sequence set forth in SEQ ID NO: 279 (or a variant thereof); (1) a HCVR that comprises: an HCDR1 comprising the amino acid sequence set forth in SEQ ID NO: 282 (or a variant thereof), an HCDR2 comprising the amino acid sequence set forth in SEQ ID NO: 283 (or a variant thereof), and an HCDR3 comprising the amino acid sequence set forth in SEQ ID NO: 284 (or a variant thereof); and a LCVR that comprises: an LCDR1 comprising the amino acid sequence set forth in SEQ ID NO: 287 (or a variant thereof), an LCDR2 comprising the amino acid sequence set forth in SEQ ID NO: 288 (or a variant thereof), and an LCDR3 comprising the amino acid sequence set forth in SEQ ID NO: 289 (or a variant thereof); (m) a HCVR that comprises: an HCDR1 comprising the amino acid sequence set forth in SEQ ID NO: 292 (or a variant thereof), an HCDR2 comprising the amino acid sequence set forth in SEQ ID NO: 293 (or a variant thereof), and an HCDR3 comprising the amino acid sequence set forth in SEQ ID NO: 294 (or a variant thereof); and a LCVR that comprises: an LCDR1 comprising the amino acid sequence set forth in SEQ ID NO: 297 (or a variant thereof), an LCDR2 comprising the amino acid sequence set forth in SEQ ID NO: 298 (or a variant thereof), and an LCDR3 comprising the amino acid sequence set forth in SEQ ID NO: 299 (or a variant thereof); (n) a HCVR that comprises: an HCDR1 comprising the amino acid sequence set forth in SEQ ID NO: 302 (or a variant thereof), an HCDR2 comprising the amino acid sequence set forth in SEQ ID NO: 303 (or a variant thereof), and an HCDR3 comprising the amino acid sequence set forth in SEQ ID NO: 304 (or a variant thereof); and a LCVR that comprises: an LCDR1 comprising the amino acid sequence set forth in SEQ ID NO: 307 (or a variant thereof), an LCDR2 comprising the amino acid sequence set forth in SEQ ID NO: 308 (or a variant thereof), and an LCDR3 comprising the amino acid sequence set forth in SEQ ID NO: 309 (or a variant thereof); (o) a HCVR that comprises: an HCDR1 comprising the amino acid sequence set forth in SEQ ID NO: 312 (or a variant thereof), an HCDR2 comprising the amino acid sequence set forth in SEQ ID NO: 313 (or a variant thereof), and an HCDR3 comprising the amino acid sequence set forth in SEQ ID NO: 314 (or a variant thereof); and a LCVR that comprises: an LCDR1 comprising the amino acid sequence set forth in SEQ ID NO: 317 (or a variant thereof), an LCDR2 comprising the amino acid sequence set forth in SEQ ID NO: 318 (or a variant thereof), and an LCDR3 comprising the amino acid sequence set forth in SEQ ID NO: 319 (or a variant thereof); (p) a HCVR that comprises: an HCDR1 comprising the amino acid sequence set forth in SEQ ID NO: 322 (or a variant thereof), an HCDR2 comprising the amino acid sequence set forth in SEQ ID NO: 323 (or a variant thereof), and an HCDR3 comprising the amino acid sequence set forth in SEQ ID NO: 324 (or a variant thereof); and a LCVR that comprises: an LCDR1 comprising the amino acid sequence set forth in SEQ ID NO: 327 (or a variant thereof), an LCDR2 comprising the amino acid sequence set forth in SEQ ID NO: 328 (or a variant thereof), and an LCDR3 comprising the amino acid sequence set forth in SEQ ID NO: 329 (or a variant thereof); (q) a HCVR that comprises: an HCDR1 comprising the amino acid sequence set forth in SEQ ID NO: 332 (or a variant thereof), an HCDR2 comprising the amino acid sequence set forth in SEQ ID NO: 333 (or a variant thereof), and an HCDR3 comprising the amino acid sequence set forth in SEQ ID NO: 334 (or a variant thereof); and a LCVR that comprises: an LCDR1 comprising the amino acid sequence set forth in SEQ ID NO: 337 (or a variant thereof), an LCDR2 comprising the amino acid sequence set forth in SEQ ID NO: 338 (or a variant thereof), and an LCDR3 comprising the amino acid sequence set forth in SEQ ID NO: 339 (or a variant thereof); (r) a HCVR that comprises: an HCDR1 comprising the amino acid sequence set forth in SEQ ID NO: 342 (or a variant thereof), an HCDR2 comprising the amino acid sequence set forth in SEQ ID NO: 343 (or a variant thereof), and an HCDR3 comprising the amino acid sequence set forth in SEQ ID NO: 344 (or a variant thereof); and a LCVR that comprises: an LCDR1 comprising the amino acid sequence set forth in SEQ ID NO: 347 (or a variant thereof), an LCDR2 comprising the amino acid sequence set forth in SEQ ID NO: 348 (or a variant thereof), and an LCDR3 comprising the amino acid sequence set forth in SEQ ID NO: 349 (or a variant thereof); (s) a HCVR that comprises: an HCDR1 comprising the amino acid sequence set forth in SEQ ID NO: 352 (or a variant thereof), an HCDR2 comprising the amino acid sequence set forth in SEQ ID NO: 353 (or a variant thereof), and an HCDR3 comprising the amino acid sequence set forth in SEQ ID NO: 354 (or a variant thereof); and a LCVR that comprises: an LCDR1 comprising the amino acid sequence set forth in SEQ ID NO: 357 (or a variant thereof), an LCDR2 comprising the amino acid sequence set forth in SEQ ID NO: 358 (or a variant thereof), and an LCDR3 comprising the amino acid sequence set forth in SEQ ID NO: 359 (or a variant thereof); (t) a HCVR that comprises: an HCDR1 comprising the amino acid sequence set forth in SEQ ID NO: 362 (or a variant thereof), an HCDR2 comprising the amino acid sequence set forth in SEQ ID NO: 363 (or a variant thereof), and an HCDR3 comprising the amino acid sequence set forth in SEQ ID NO: 364 (or a variant thereof); and a LCVR that comprises: an LCDR1 comprising the amino acid sequence set forth in SEQ ID NO: 367 (or a variant thereof), an LCDR2 comprising the amino acid sequence set forth in SEQ ID NO: 368 (or a variant thereof), and an LCDR3 comprising the amino acid sequence set forth in SEQ ID NO: 369 (or a variant thereof); (u) a HCVR that comprises: an HCDR1 comprising the amino acid sequence set forth in SEQ ID NO: 372 (or a variant thereof), an HCDR2 comprising the amino acid sequence set forth in SEQ ID NO: 373 (or a variant thereof), and an HCDR3 comprising the amino acid sequence set forth in SEQ ID NO: 374 (or a variant thereof); and a LCVR that comprises: an LCDR1 comprising the amino acid sequence set forth in SEQ ID NO: 377 (or a variant thereof), an LCDR2 comprising the amino acid sequence set forth in SEQ ID NO: 378 (or a variant thereof), and an LCDR3 comprising the amino acid sequence set forth in SEQ ID NO: 379 (or a variant thereof); (v) a HCVR that comprises: an HCDR1 comprising the amino acid sequence set forth in SEQ ID NO: 382 (or a variant thereof), an HCDR2 comprising the amino acid sequence set forth in SEQ ID NO: 383 (or a variant thereof), and an HCDR3 comprising the amino acid sequence set forth in SEQ ID NO: 384 (or a variant thereof); and a LCVR that comprises: an LCDR1 comprising the amino acid sequence set forth in SEQ ID NO: 387 (or a variant thereof), an LCDR2 comprising the amino acid sequence set forth in SEQ ID NO: 388 (or a variant thereof), and an LCDR3 comprising the amino acid sequence set forth in SEQ ID NO: 389 (or a variant thereof); (w) a HCVR that comprises: an HCDR1 comprising the amino acid sequence set forth in SEQ ID NO: 392 (or a variant thereof), an HCDR2 comprising the amino acid sequence set forth in SEQ ID NO: 393 (or a variant thereof), and an HCDR3 comprising the amino acid sequence set forth in SEQ ID NO: 394 (or a variant thereof); and a LCVR that comprises: an LCDR1 comprising the amino acid sequence set forth in SEQ ID NO: 397 (or a variant thereof), an LCDR2 comprising the amino acid sequence set forth in SEQ ID NO: 398 (or a variant thereof), and an LCDR3 comprising the amino acid sequence set forth in SEQ ID NO: 399 (or a variant thereof); (x) a HCVR that comprises: an HCDR1 comprising the amino acid sequence set forth in SEQ ID NO: 402 (or a variant thereof), an HCDR2 comprising the amino acid sequence set forth in SEQ ID NO: 403 (or a variant thereof), and an HCDR3 comprising the amino acid sequence set forth in SEQ ID NO: 404 (or a variant thereof); and a LCVR that comprises: an LCDR1 comprising the amino acid sequence set forth in SEQ ID NO: 407 (or a variant thereof), an LCDR2 comprising the amino acid sequence set forth in SEQ ID NO: 408 (or a variant thereof), and an LCDR3 comprising the amino acid sequence set forth in SEQ ID NO: 409 (or a variant thereof); (y) a HCVR that comprises: an HCDR1 comprising the amino acid sequence set forth in SEQ ID NO: 412 (or a variant thereof), an HCDR2 comprising the amino acid sequence set forth in SEQ ID NO: 413 (or a variant thereof), and an HCDR3 comprising the amino acid sequence set forth in SEQ ID NO: 414 (or a variant thereof); and a LCVR that comprises: an LCDR1 comprising the amino acid sequence set forth in SEQ ID NO: 417 (or a variant thereof), an LCDR2 comprising the amino acid sequence set forth in SEQ ID NO: 418 (or a variant thereof), and an LCDR3 comprising the amino acid sequence set forth in SEQ ID NO: 419 (or a variant thereof); (z) a HCVR that comprises: an HCDR1 comprising the amino acid sequence set forth in SEQ ID NO: 422 (or a variant thereof), an HCDR2 comprising the amino acid sequence set forth in SEQ ID NO: 423 (or a variant thereof), and an HCDR3 comprising the amino acid sequence set forth in SEQ ID NO: 424 (or a variant thereof); and a LCVR that comprises: an LCDR1 comprising the amino acid sequence set forth in SEQ ID NO: 427 (or a variant thereof), an LCDR2 comprising the amino acid sequence set forth in SEQ ID NO: 428 (or a variant thereof), and an LCDR3 comprising the amino acid sequence set forth in SEQ ID NO: 429 (or a variant thereof); (aa) a HCVR that comprises: an HCDR1 comprising the amino acid sequence set forth in SEQ ID NO: 432 (or a variant thereof), an HCDR2 comprising the amino acid sequence set forth in SEQ ID NO: 433 (or a variant thereof), and an HCDR3 comprising the amino acid sequence set forth in SEQ ID NO: 434 (or a variant thereof); and a LCVR that comprises: an LCDR1 comprising the amino acid sequence set forth in SEQ ID NO: 437 (or a variant thereof), an LCDR2 comprising the amino acid sequence set forth in SEQ ID NO: 438 (or a variant thereof), and an LCDR3 comprising the amino acid sequence set forth in SEQ ID NO: 439 (or a variant thereof); (ab) a HCVR that comprises: an HCDR1 comprising the amino acid sequence set forth in SEQ ID NO: 442 (or a variant thereof), an HCDR2 comprising the amino acid sequence set forth in SEQ ID NO: 443 (or a variant thereof), and an HCDR3 comprising the amino acid sequence set forth in SEQ ID NO: 444 (or a variant thereof); and a LCVR that comprises: an LCDR1 comprising the amino acid sequence set forth in SEQ ID NO: 447 (or a variant thereof), an LCDR2 comprising the amino acid sequence set forth in SEQ ID NO: 448 (or a variant thereof), and an LCDR3 comprising the amino acid sequence set forth in SEQ ID NO: 449 (or a variant thereof); (ac) a HCVR that comprises: an HCDR1 comprising the amino acid sequence set forth in SEQ ID NO: 452 (or a variant thereof), an HCDR2 comprising the amino acid sequence set forth in SEQ ID NO: 453 (or a variant thereof), and an HCDR3 comprising the amino acid sequence set forth in SEQ ID NO: 454 (or a variant thereof); and a LCVR that comprises: an LCDR1 comprising the amino acid sequence set forth in SEQ ID NO: 457 (or a variant thereof), an LCDR2 comprising the amino acid sequence set forth in SEQ ID NO: 458 (or a variant thereof), and an LCDR3 comprising the amino acid sequence set forth in SEQ ID NO: 459 (or a variant thereof); (ad) a HCVR that comprises: an HCDR1 comprising the amino acid sequence set forth in SEQ ID NO: 462 (or a variant thereof), an HCDR2 comprising the amino acid sequence set forth in SEQ ID NO: 463 (or a variant thereof), and an HCDR3 comprising the amino acid sequence set forth in SEQ ID NO: 464 (or a variant thereof); and a LCVR that comprises: an LCDR1 comprising the amino acid sequence set forth in SEQ ID NO: 467 (or a variant thereof), an LCDR2 comprising the amino acid sequence set forth in SEQ ID NO: 468 (or a variant thereof), and an LCDR3 comprising the amino acid sequence set forth in SEQ ID NO: 469 (or a variant thereof); (ae) a HCVR that comprises: an HCDR1 comprising the amino acid sequence set forth in SEQ ID NO: 472 (or a variant thereof), an HCDR2 comprising the amino acid sequence set forth in SEQ ID NO: 473 (or a variant thereof), and an HCDR3 comprising the amino acid sequence set forth in SEQ ID NO: 474 (or a variant thereof); and a LCVR that comprises: an LCDR1 comprising the amino acid sequence set forth in SEQ ID NO: 477 (or a variant thereof), an LCDR2 comprising the amino acid sequence set forth in SEQ ID NO: 478 (or a variant thereof), and an LCDR3 comprising the amino acid sequence set forth in SEQ ID NO: 479 (or a variant thereof); and/or (af) a HCVR that comprises: an HCDR1 comprising the amino acid sequence set forth in SEQ ID NO: 482 (or a variant thereof), an HCDR2 comprising the amino acid sequence set forth in SEQ ID NO: 483 (or a variant thereof), and an HCDR3 comprising the amino acid sequence set forth in SEQ ID NO: 484 (or a variant thereof); and a LCVR that comprises: an LCDR1 comprising the amino acid sequence set forth in SEQ ID NO: 487 (or a variant thereof), an LCDR2 comprising the amino acid sequence set forth in SEQ ID NO: 488 (or a variant thereof), and an LCDR3 comprising the amino acid sequence set forth in SEQ ID NO: 489 (or a variant thereof). A variant refers to a polypeptide comprising an amino acid sequence that is at least about 70-99.9% (e.g., 70, 72, 74, 75, 76, 79, 80, 81, 82, 83, 84, 85, 86, 87, 88, 89, 90, 91, 92, 93, 94, 95, 96, 97, 98, 99, 99.5, 99.9%) identical or similar to a referenced amino acid sequence that is set forth herein.

[0269] In another example, the anti-TfR antibody or antigen-binding fragment thereof or scFv can comprise: (w) a HCVR that comprises: an HCDR1 comprising the amino acid sequence set forth in SEQ ID NO: 392 (or a variant thereof), an HCDR2 comprising the amino acid sequence set forth in SEQ ID NO: 393 (or a variant thereof), and an HCDR3 comprising the amino acid sequence set forth in SEQ ID NO: 394 (or a variant thereof); and a LCVR that comprises: an LCDR1 comprising the amino acid sequence set forth in SEQ ID NO: 397 (or a variant thereof), an LCDR2 comprising the amino acid sequence set forth in SEQ ID NO: 398 (or a variant thereof), and an LCDR3 comprising the amino acid sequence set forth in SEQ ID NO: 399 (or a variant thereof); or (y) a HCVR that comprises: an HCDR1 comprising the amino acid sequence set forth in SEQ ID NO: 412 (or a variant thereof), an HCDR2 comprising the amino acid sequence set forth in SEQ ID NO: 413 (or a variant thereof), and an HCDR3 comprising the amino acid sequence set forth in SEQ ID NO: 414 (or a variant thereof); and a LCVR that comprises: an LCDR1 comprising the amino acid sequence set forth in SEQ ID NO: 417 (or a variant thereof), an LCDR2 comprising the amino acid sequence set forth in SEQ ID NO: 418 (or a variant thereof), and an LCDR3 comprising the amino acid sequence set forth in SEQ ID NO: 419 (or a variant thereof). In another example, the anti-TfR antibody or antigen-binding fragment thereof or scFv can comprise a HCVR that comprises: an HCDR1 comprising the amino acid sequence set forth in SEQ ID NO: 392 (or a variant thereof), an HCDR2 comprising the amino acid sequence set forth in SEQ ID NO: 393 (or a variant thereof), and an HCDR3 comprising the amino acid sequence set forth in SEQ ID NO: 394 (or a variant thereof); and a LCVR that comprises: an LCDR1 comprising the amino acid sequence set forth in SEQ ID NO: 397 (or a variant thereof), an LCDR2 comprising the amino acid sequence set forth in SEQ ID NO: 398 (or a variant thereof), and an LCDR3 comprising the amino acid sequence set forth in SEQ ID NO: 399 (or a variant thereof). In another example, the anti-TfR antibody or antigen-binding fragment thereof or scFv can comprise a HCVR that comprises: an HCDR1 comprising the amino acid sequence set forth in SEQ ID NO: 412 (or a variant thereof), an HCDR2 comprising the amino acid sequence set forth in SEQ ID NO: 413 (or a variant thereof), and an HCDR3 comprising the amino acid sequence set forth in SEQ ID NO: 414 (or a variant thereof); and a LCVR that comprises: an LCDR1 comprising the amino acid sequence set forth in SEQ ID NO: 417 (or a variant thereof), an LCDR2 comprising the amino acid sequence set forth in SEQ ID NO: 418 (or a variant thereof), and an LCDR3 comprising the amino acid sequence set forth in SEQ ID NO: 419 (or a variant thereof).

[0270] In another example, the anti-TfR antibody or antigen-binding fragment thereof or scFv can comprise: (i) a HCVR that comprises the amino acid sequence set forth in SEQ ID NO: 171 or 680 (or a variant thereof); and a LCVR that comprises the amino acid sequence set forth in SEQ ID NO: 176 (or a variant thereof); (ii) a HCVR that comprises the amino acid sequence set forth in SEQ ID NO: 181 or 681 (or a variant thereof); and a LCVR that comprises the amino acid sequence set forth in SEQ ID NO: 186 (or a variant thereof); (iii) a HCVR that comprises the amino acid sequence set forth in SEQ ID NO: 191 or 682 (or a variant thereof); and a LCVR that comprises the amino acid sequence set forth in SEQ ID NO: 196 (or a variant thereof); (iv) a HCVR that comprises the amino acid sequence set forth in SEQ ID NO: 201 (or a variant thereof); and a LCVR that comprises the amino acid sequence set forth in SEQ ID NO: 206 or 683 (or a variant thereof); (v) a HCVR that comprises the amino acid sequence set forth in SEQ ID NO: 211 (or a variant thereof); and a LCVR that comprises the amino acid sequence set forth in SEQ ID NO: 216 or 684 (or a variant thereof); (vi) a HCVR that comprises the amino acid sequence set forth in SEQ ID NO: 221 or 685 (or a variant thereof); and a LCVR that comprises the amino acid sequence set forth in SEQ ID NO: 226 or 686 (or a variant thereof); (vii) a HCVR that comprises the amino acid sequence set forth in SEQ ID NO: 231 or 687 (or a variant thereof); and a LCVR that comprises the amino acid sequence set forth in SEQ ID NO: 236 or 688 (or a variant thereof); (viii) a HCVR that comprises the amino acid sequence set forth in SEQ ID NO: 241 or 689 (or a variant thereof); and a LCVR that comprises the amino acid sequence set forth in SEQ ID NO: 246 or 690 (or a variant thereof); (ix) a HCVR that comprises the amino acid sequence set forth in SEQ ID NO: 251 (or a variant thereof); and a LCVR that comprises the amino acid sequence set forth in SEQ ID NO: 256 (or a variant thereof); (x) a HCVR that comprises the amino acid sequence set forth in SEQ ID NO: 261 or 691 (or a variant thereof); and a LCVR that comprises the amino acid sequence set forth in SEQ ID NO: 266 (or a variant thereof); (xi) a HCVR that comprises the amino acid sequence set forth in SEQ ID NO: 271 (or a variant thereof); and a LCVR that comprises the amino acid sequence set forth in SEQ ID NO: 276 (or a variant thereof); (xii) a HCVR that comprises the amino acid sequence set forth in SEQ ID NO: 281 or 692 (or a variant thereof); and a LCVR that comprises the amino acid sequence set forth in SEQ ID NO: 286 or 693 (or a variant thereof); (xiii) a HCVR that comprises the amino acid sequence set forth in SEQ ID NO: 291 (or a variant thereof); and a LCVR that comprises the amino acid sequence set forth in SEQ ID NO: 296 (or a variant thereof); (xiv) a HCVR that comprises the amino acid sequence set forth in SEQ ID NO: 301 (or a variant thereof); and a LCVR that comprises the amino acid sequence set forth in SEQ ID NO: 306 (or a variant thereof); (xv) a HCVR that comprises the amino acid sequence set forth in SEQ ID NO: 311 or 694 (or a variant thereof); and a LCVR that comprises the amino acid sequence set forth in SEQ ID NO: 316 or 695 (or a variant thereof); (xvi) a HCVR that comprises the amino acid sequence set forth in SEQ ID NO: 321 (or a variant thereof); and a LCVR that comprises the amino acid sequence set forth in SEQ ID NO: 326 (or a variant thereof); (xvii) a HCVR that comprises the amino acid sequence set forth in SEQ ID NO: 331 or 696 (or a variant thereof); and a LCVR that comprises the amino acid sequence set forth in SEQ ID NO: 336 (or a variant thereof); (xviii) a HCVR that comprises the amino acid sequence set forth in SEQ ID NO: 341 (or a variant thereof); and a LCVR that comprises the amino acid sequence set forth in SEQ ID NO: 346 (or a variant thereof); (xix) a HCVR that comprises the amino acid sequence set forth in SEQ ID NO: 351 or 697 (or a variant thereof); and a LCVR that comprises the amino acid sequence set forth in SEQ ID NO: 356 or 698 (or a variant thereof); (xx) a HCVR that comprises the amino acid sequence set forth in SEQ ID NO: 361 or 699 (or a variant thereof); and a LCVR that comprises the amino acid sequence set forth in SEQ ID NO: 366 (or a variant thereof); (xxi) a HCVR that comprises the amino acid sequence set forth in SEQ ID NO: 371 or 700 (or a variant thereof); and a LCVR that comprises the amino acid sequence set forth in SEQ ID NO: 376 (or a variant thereof); (xxii) a HCVR that comprises the amino acid sequence set forth in SEQ ID NO: 381 (or a variant thereof); and a LCVR that comprises the amino acid sequence set forth in SEQ ID NO: 386 (or a variant thereof); (xxiii) a HCVR that comprises the amino acid sequence set forth in SEQ ID NO: 391 (or a variant thereof); and a LCVR that comprises the amino acid sequence set forth in SEQ ID NO: 396 (or a variant thereof); (xxiv) a HCVR that comprises the amino acid sequence set forth in SEQ ID NO: 401 (or a variant thereof); and a LCVR that comprises the amino acid sequence set forth in SEQ ID NO: 406 (or a variant thereof); (xxv) a HCVR that comprises the amino acid sequence set forth in SEQ ID NO: 411 (or a variant thereof); and a LCVR that comprises the amino acid sequence set forth in SEQ ID NO: 416 (or a variant thereof); (xxvi) a HCVR that comprises the amino acid sequence set forth in SEQ ID NO: 421 or 701 (or a variant thereof); and a LCVR that comprises the amino acid sequence set forth in SEQ ID NO: 426 (or a variant thereof); (xxvii) a HCVR that comprises the amino acid sequence set forth in SEQ ID NO: 431 (or a variant thereof); and a LCVR that comprises the amino acid sequence set forth in SEQ ID NO: 436 (or a variant thereof); (xxviii) a HCVR that comprises the amino acid sequence set forth in SEQ ID NO: 441 (or a variant thereof); and a LCVR that comprises the amino acid sequence set forth in SEQ ID NO: 446 (or a variant thereof); (xxix) a HCVR that comprises the amino acid sequence set forth in SEQ ID NO: 451 (or a variant thereof); and a LCVR that comprises the amino acid sequence set forth in SEQ ID NO: 456 (or a variant thereof); (xxx) a HCVR that comprises the amino acid sequence set forth in SEQ ID NO: 461 (or a variant thereof); and a LCVR that comprises the amino acid sequence set forth in SEQ ID NO: 466 (or a variant thereof); (xxxi) a HCVR that comprises the amino acid sequence set forth in SEQ ID NO: 471 or 702 (or a variant thereof); and a LCVR that comprises the amino acid sequence set forth in SEQ ID NO: 476 or 632 (or a variant thereof); and/or (xxxii) a HCVR that comprises the amino acid sequence set forth in SEQ ID NO: 481 (or a variant thereof); and a LCVR that comprises the amino acid sequence set forth in SEQ ID NO: 486 or 703 (or a variant thereof), optionally wherein the HCVR and LCVR are linked by a linker (e.g., that comprises an amino acid sequence, e.g., about 10 amino acids in length, for example, 1, 2, 3, 4, 5, 6, 7, 8, 8, or 10 repeats of Gly₄Ser (SEQ ID NO: 537). A variant refers to a polypeptide comprising an amino acid sequence that is at least about 70-99.9% (e.g., 70, 72, 74, 75, 76, 79, 80, 81, 82, 83, 84, 85, 86, 87, 88, 89, 90, 91, 92, 93, 94, 95, 96, 97, 98, 99, 99.5, 99.9%) identical or similar to a referenced amino acid sequence that is set forth herein.

[0271] In another example, the anti-TfR antibody or antigen-binding fragment thereof or scFv can comprise: (xxiii) a HCVR that comprises the amino acid sequence set forth in SEQ ID NO: 391 (or a variant thereof); and a LCVR that comprises the amino acid sequence set forth in SEQ ID NO: 396 (or a variant thereof); or (xxv) a HCVR that comprises the amino acid sequence set forth in SEQ ID NO: 411 (or a variant thereof); and a LCVR that comprises the amino acid sequence set forth in SEQ ID NO: 416 (or a variant thereof). In another example, the anti-TfR antibody or antigen-binding fragment thereof or scFv can comprise a HCVR that comprises the amino acid sequence set forth in SEQ ID NO: 391 (or a variant thereof); and a LCVR that comprises the amino acid sequence set forth in SEQ ID NO: 396 (or a variant thereof). In another example, the anti-TfR antibody or antigen-binding fragment thereof or scFv can comprise a HCVR that comprises the amino acid sequence set forth in SEQ ID NO: 411 (or a variant thereof); and a LCVR that comprises the amino acid sequence set forth in SEQ ID NO: 416 (or a variant thereof).

[0272] Examples of polynucleotides encoding anti-TfR antibodies or antigen-binding fragments thereof or scFvs are provided in Table 2 and include: (1) a polynucleotide encoding a HCVR that comprises the nucleotide sequence set forth in SEQ ID NO: 170, and a LCVR that comprises the nucleotide sequence set forth in SEQ ID NO: 175; (2) a polynucleotide encoding a HCVR that comprises the nucleotide sequence set forth in SEQ ID NO: 180, and a LCVR that comprises the nucleotide sequence set forth in SEQ ID NO: 185; (3) a polynucleotide encoding a HCVR that comprises the nucleotide sequence set forth in SEQ ID NO: 190, and a LCVR that comprises the nucleotide sequence set forth in SEQ ID NO: 195; (4) a polynucleotide encoding a HCVR that comprises the nucleotide sequence set forth in SEQ ID NO: 200, and a LCVR that comprises the nucleotide sequence set forth in SEQ ID NO: 205; (5) a polynucleotide encoding a HCVR that comprises the nucleotide sequence set forth in SEQ ID NO: 210, and a LCVR that comprises the nucleotide sequence set forth in SEQ ID NO: 215; (6) a polynucleotide encoding a HCVR that comprises the nucleotide sequence set forth in SEQ ID NO: 220, and a LCVR that comprises the nucleotide sequence set forth in SEQ ID NO: 225; (7) a polynucleotide encoding a HCVR that comprises the nucleotide sequence set forth in SEQ ID NO: 230, and a LCVR that comprises the nucleotide sequence set forth in SEQ ID NO: 235; (8) a polynucleotide encoding a HCVR that comprises the nucleotide sequence set forth in SEQ ID NO: 240, and a LCVR that comprises the nucleotide sequence set forth in SEQ ID NO: 245; (9) a polynucleotide encoding a HCVR that comprises the nucleotide sequence set forth in SEQ ID NO: 250, and a LCVR that comprises the nucleotide sequence set forth in SEQ ID NO: 255; (10) a polynucleotide encoding a HCVR that comprises the nucleotide sequence set forth in SEQ ID NO: 260, and a LCVR that comprises the nucleotide sequence set forth in SEQ ID NO: 265; (11) a polynucleotide encoding a HCVR that comprises the nucleotide sequence set forth in SEQ ID NO: 270, and a LCVR that comprises the nucleotide sequence set forth in SEQ ID NO: 275; (12) a polynucleotide encoding a HCVR that comprises the nucleotide sequence set forth in SEQ ID NO: 280, and a LCVR that comprises the nucleotide sequence set forth in SEQ ID NO: 285; (13) a polynucleotide encoding a HCVR that comprises the nucleotide sequence set forth in SEQ ID NO: 290, and a LCVR that comprises the nucleotide sequence set forth in SEQ ID NO: 295; (14) a polynucleotide encoding a HCVR that comprises the nucleotide sequence set forth in SEQ ID NO: 300, and a LCVR that comprises the nucleotide sequence set forth in SEQ ID NO: 305; (15) a polynucleotide encoding a HCVR that comprises the nucleotide sequence set forth in SEQ ID NO: 310, and a LCVR that comprises the nucleotide sequence set forth in SEQ ID NO: 315; (16) a polynucleotide encoding a HCVR that comprises the nucleotide sequence set forth in SEQ ID NO: 320, and a LCVR that comprises the nucleotide sequence set forth in SEQ ID NO: 325; (17) a polynucleotide encoding a HCVR that comprises the nucleotide sequence set forth in SEQ ID NO: 330, and a LCVR that comprises the nucleotide sequence set forth in SEQ ID NO: 335; (18) a polynucleotide encoding a HCVR that comprises the nucleotide sequence set forth in SEQ ID NO: 340, and a LCVR that comprises the nucleotide sequence set forth in SEQ ID NO: 345; (19) a polynucleotide encoding a HCVR that comprises the nucleotide sequence set forth in SEQ ID NO: 350, and a LCVR that comprises the nucleotide sequence set forth in SEQ ID NO: 355; (20) a polynucleotide encoding a HCVR that comprises the nucleotide sequence set forth in SEQ ID NO: 360, and a LCVR that comprises the nucleotide sequence set forth in SEQ ID NO: 365; (21) a polynucleotide encoding a HCVR that comprises the nucleotide sequence set forth in SEQ ID NO: 370, and a LCVR that comprises the nucleotide sequence set forth in SEQ ID NO: 375; (22) a polynucleotide encoding a HCVR that comprises the nucleotide sequence set forth in SEQ ID NO: 380, and a LCVR that comprises the nucleotide sequence set forth in SEQ ID NO: 385; (23) a polynucleotide encoding a HCVR that comprises the nucleotide sequence set forth in SEQ ID NO: 390, and a LCVR that comprises the nucleotide sequence set forth in SEQ ID NO: 395; (24) a polynucleotide encoding a HCVR that comprises the nucleotide sequence set forth in SEQ ID NO: 400, and a LCVR that comprises the nucleotide sequence set forth in SEQ ID NO: 405; (25) a polynucleotide encoding a HCVR that comprises the nucleotide sequence set forth in SEQ ID NO: 410, and a LCVR that comprises the nucleotide sequence set forth in SEQ ID NO: 415; (26) a polynucleotide encoding a HCVR that comprises the nucleotide sequence set forth in SEQ ID NO: 420, and a LCVR that comprises the nucleotide sequence set forth in SEQ ID NO: 425; (27) a polynucleotide encoding a HCVR that comprises the nucleotide sequence set forth in SEQ ID NO: 430, and a LCVR that comprises the nucleotide sequence set forth in SEQ ID NO: 435; (28) a polynucleotide encoding a HCVR that comprises the nucleotide sequence set forth in SEQ ID NO: 440, and a LCVR that comprises the nucleotide sequence set forth in SEQ ID NO: 445; (29) a polynucleotide encoding a HCVR that comprises the nucleotide sequence set forth in SEQ ID NO: 450, and a LCVR that comprises the nucleotide sequence set forth in SEQ ID NO: 455; (30) a polynucleotide encoding a HCVR that comprises the nucleotide sequence set forth in SEQ ID NO: 460, and a LCVR that comprises the nucleotide sequence set forth in SEQ ID NO: 465; (31) a polynucleotide encoding a HCVR that comprises the nucleotide sequence set forth in SEQ ID NO: 470, and a LCVR that comprises the nucleotide sequence set forth in SEQ ID NO: 475; or (32) a polynucleotide encoding a HCVR that comprises the nucleotide sequence set forth in SEQ ID NO: 480, and a LCVR that comprises the nucleotide sequence set forth in SEQ ID NO: 485, wherein the HCVR and LCVR are in either order.

[0273] In an embodiment, an anti-hTfR scFv, in V_{L}-(Gly₄Ser)₃(SEQ ID NO: 616)-V_{H} format (Gly₄Ser=SEQ ID NO: 537), comprises the amino acid sequence set forth in any one of SEQ ID NOS: 492-523. Also contemplated are such fusions that are in the format V_{H}-(Gly₄Ser)₃(SEQ ID NO: 616)-V_{L} (Gly₄Ser=SEQ ID NO: 537).

[0274] In an embodiment, the antigen-binding fragment comprises an scFv. In an embodiment, the scFv comprises the amino acid sequence set forth in SEQ ID NO: 508 (or a variant thereof) or comprises the amino acid sequence set forth in SEQ ID NO: 505 (or a variant thereof). In an embodiment, the scFv comprises the amino acid sequence set forth in SEQ ID NO: 508 (or a variant thereof). In an embodiment, the antigen-binding fragment comprises an scFv. In an embodiment, the scFv comprises the amino acid sequence set forth in SEQ ID NO: 505 (or a variant thereof).

[0275] In an embodiment, the TfR-binding delivery domain can be an scFv. In an embodiment, the anti-TfR scFv protein is (or the anti-TfR scFv protein comprises a sequence) at least 90%, at least 91%, at least 92%, at least 93%, at least 94%, at least 95%, at least 96%, at least 97%, at least 98%, at least 99%, at least 99.5%, or 100% identical to any one of SEQ ID NOS: 494, 503, 505, and 508 (and, e.g., retaining TfR-binding activity). Optionally, the anti-TfR scFv protein is (or the anti-TfR scFv protein comprises a sequence) at least 95%, at least 96%, at least 97%, at least 98%, at least 99%, at least 99.5%, or 100% identical to any one of SEQ ID NOS: 494, 503, 505, and 508 (and, e.g., retaining TfR-binding activity). Optionally, the anti-TfR scFv protein is (or the anti-TfR scFv protein comprises a sequence) at least 99%, at least 99.5%, or 100% identical to any one of SEQ ID NOS: 494, 503, 505, and 508 (and, e.g., retaining TfR-binding activity). Optionally, the anti-TfR scFv protein comprises the sequence set forth in any one of SEQ ID NOS: 494, 503, 505, and 508. Optionally, the anti-TfR scFv protein consists essentially of the sequence set forth in any one of SEQ ID NOS: 494, 503, 505, and 508. Optionally, the anti-TfR scFv protein consists of the sequence set forth in any one of SEQ ID NOS: 494, 503, 505, and 508.

[0276] In an embodiment, the anti-TfR scFv protein is (or the anti-TfR scFv protein comprises a sequence) at least 90%, at least 91%, at least 92%, at least 93%, at least 94%, at least 95%, at least 96%, at least 97%, at least 98%, at least 99%, at least 99.5%, or 100% identical to SEQ ID NO: 508 (and, e.g., retaining TfR-binding activity). Optionally, the anti-TfR scFv protein is (or the anti-TfR scFv protein comprises a sequence) at least 95%, at least 96%, at least 97%, at least 98%, at least 99%, at least 99.5%, or 100% identical to SEQ ID NO: 508 (and, e.g., retaining TfR-binding activity). Optionally, the anti-TfR scFv protein is (or the anti-TfR scFv protein comprises a sequence) at least 99%, at least 99.5%, or 100% identical to SEQ ID NO: 508 (and, e.g., retaining TfR-binding activity). Optionally, the anti-TfR scFv protein comprises the sequence set forth in SEQ ID NO: 508. Optionally, the anti-TfR scFv protein consists essentially of the sequence set forth in SEQ ID NO: 508. Optionally, the anti-TfR scFv protein consists of the sequence set forth in SEQ ID NO: 508.

[0277] In an embodiment, the anti-TfR scFv protein is (or the anti-TfR scFv protein comprises a sequence) at least 90%, at least 91%, at least 92%, at least 93%, at least 94%, at least 95%, at least 96%, at least 97%, at least 98%, at least 99%, at least 99.5%, or 100% identical to SEQ ID NO: 505 (and, e.g., retaining TfR-binding activity). Optionally, the anti-TfR scFv protein is (or the anti-TfR scFv protein comprises a sequence) at least 95%, at least 96%, at least 97%, at least 98%, at least 99%, at least 99.5%, or 100% identical to SEQ ID NO: 505 (and, e.g., retaining TfR-binding activity). Optionally, the anti-TfR scFv protein is (or the anti-TfR scFv protein comprises a sequence) at least 99%, at least 99.5%, or 100% identical to SEQ ID NO: 505 (and, e.g., retaining TfR-binding activity). Optionally, the anti-TfR scFv protein comprises the sequence set forth in SEQ ID NO: 505. Optionally, the anti-TfR scFv protein consists essentially of the sequence set forth in SEQ ID NO: 505. Optionally, the anti-TfR scFv protein consists of the sequence set forth in SEQ ID NO: 505.

[0278] In an embodiment, the multidomain therapeutic protein comprises the amino acid sequence set forth in SEQ ID NO: 737 (or a variant thereof) or comprises the amino acid sequence set forth in SEQ ID NO: 739 (or a variant thereof). In an embodiment, the multidomain therapeutic protein comprises the amino acid sequence set forth in SEQ ID NO: 737 (or a variant thereof). In an embodiment, the multidomain therapeutic protein comprises the amino acid sequence set forth in SEQ ID NO: 739 (or a variant thereof).

[0279] In another example, the TfR-binding delivery domain can be a Fab fragment (e.g., that binds specifically to human transferrin receptor). Fab fragments typically contain one complete light chain, VL and constant light domain, e.g., kappa (e.g., RTVAAPSVFIFPPSDEQLKSGTASVVCLLNNFYPREAKVQWKVDNALQSGNSQESVTEQDSKDS TYSLSSTLTLSKADYEKHKVYACEVTHQGLSSPVTKSFNRGEC (SEQ ID NO: 538)) and the V_{H} and IgG1 CH1 portion (e.g., ASTKGPSVFPLAPSSKSTSGGTAALGCLVKDYFPEPVTVSWNSGALTSGVHTFPAVLQSSGLYS LSSVVTVPSSSLGTQTYICNVNHKPSNTKVDKKVEPKSCDKTH (SEQ ID NO: 539)) or IgG4 CH1 (e.g., ASTKGPSVFPLAPCSRSTSESTAALGCLVKDYFPEPVTVSWNSGALTSGVHTFPAVLQSSGLYS LSSVVTVPSSSLGTKTYTCNVDHKPSNTKVDKRVESKYGPPLLQGSG (SEQ ID NO: 611) or ASTKGPSVFPLAPCSRSTSESTAALGCLVKDYFPEPVTVSWNSGALTSGVHTFPAVLQSSGLYS LSSVVTVPSSSLGTKTYTCNVDHKPSNTKVDKRVESKYGPP (SEQ ID NO: 631)) of one heavy chain. Fab fragment antibodies can be generated by papain digestion of whole IgG antibodies to remove the entire Fc fragment, including the hinge region. In some embodiments, a Fab protein can comprise a heavy chain upstream of a light chain. In some embodiments, a Fab protein can comprise a light chain upstream of a heavy chain. In one example, the antibody or antigen-binding fragment thereof or Fab protein can comprise: (1) a heavy chain variable region (HCVR) that comprises the amino acid sequence set forth in SEQ ID NO: 171 or 680, or a heavy chain variable region that includes HCDR1, HCDR2 and HCDR3 of such a HCVR-linked to the CH1 domain- and a light chain variable region (LCVR) that comprises the amino acid sequence set forth in SEQ ID NO: 176, or LCDR1, LCDR2 and LCDR3 of such a LCVR-linked to the CL domain; (2) a heavy chain variable region (HCVR) that comprises the amino acid sequence set forth in SEQ ID NO: 181 or 681, or a heavy chain variable region that includes HCDR1, HCDR2 and HCDR3 of such a HCVR-linked to the CH1 domain-and a light chain variable region (LCVR) that comprises the amino acid sequence set forth in SEQ ID NO: 186, or LCDR1, LCDR2 and LCDR3 of such a LCVR-linked to the CL domain; (3) a heavy chain variable region (HCVR) that comprises the amino acid sequence set forth in SEQ ID NO: 191 or 682, or a heavy chain variable region that includes HCDR1, HCDR2 and HCDR3 of such a HCVR-linked to the CH1 domain-and a light chain variable region (LCVR) that comprises the amino acid sequence set forth in SEQ ID NO: 196, or LCDR1, LCDR2 and LCDR3 of such a LCVR-linked to the CL domain; (4) a heavy chain variable region (HCVR) that comprises the amino acid sequence set forth in SEQ ID NO: 201, or a heavy chain variable region that includes HCDR1, HCDR2 and HCDR3 of such a HCVR-linked to the CH1 domain-and a light chain variable region (LCVR) that comprises the amino acid sequence set forth in SEQ ID NO: 206 or 683, or LCDR1, LCDR2 and LCDR3 of such a LCVR-linked to the CL domain; (5) a heavy chain variable region (HCVR) that comprises the amino acid sequence set forth in SEQ ID NO: 211, or a heavy chain variable region that includes HCDR1, HCDR2 and HCDR3 of such a HCVR-linked to the CH1 domain-and a light chain variable region (LCVR) that comprises the amino acid sequence set forth in SEQ ID NO: 216 or 684, or LCDR1, LCDR2 and LCDR3 of such a LCVR-linked to the CL domain; (6) a heavy chain variable region (HCVR) that comprises the amino acid sequence set forth in SEQ ID NO: 221 or 685, or a heavy chain variable region that includes HCDR1, HCDR2 and HCDR3 of such a HCVR-linked to the CH1 domain-and a light chain variable region (LCVR) that comprises the amino acid sequence set forth in SEQ ID NO: 226 or 686, or LCDR1, LCDR2 and LCDR3 of such a LCVR-linked to the CL domain; (7) a heavy chain variable region (HCVR) that comprises the amino acid sequence set forth in SEQ ID NO: 231 or 687, or a heavy chain variable region that includes HCDR1, HCDR2 and HCDR3 of such a HCVR-linked to the CH1 domain-and a light chain variable region (LCVR) that comprises the amino acid sequence set forth in SEQ ID NO: 236 or 688, or LCDR1, LCDR2 and LCDR3 of such a LCVR-linked to the CL domain; (8) a heavy chain variable region (HCVR) that comprises the amino acid sequence set forth in SEQ ID NO: 241 or 689, or a heavy chain variable region that includes HCDR1, HCDR2 and HCDR3 of such a HCVR-linked to the CH1 domain-and a light chain variable region (LCVR) that comprises the amino acid sequence set forth in SEQ ID NO: 246 or 690, or LCDR1, LCDR2 and LCDR3 of such a LCVR-linked to the CL domain; (9) a heavy chain variable region (HCVR) that comprises the amino acid sequence set forth in SEQ ID NO: 251, or a heavy chain variable region that includes HCDR1, HCDR2 and HCDR3 of such a HCVR-linked to the CH1 domain-and a light chain variable region (LCVR) that comprises the amino acid sequence set forth in SEQ ID NO: 256, or LCDR1, LCDR2 and LCDR3 of such a LCVR-linked to the CL domain; (10) a heavy chain variable region (HCVR) that comprises the amino acid sequence set forth in SEQ ID NO: 261 or 691, or a heavy chain variable region that includes HCDR1, HCDR2 and HCDR3 of such a HCVR-linked to the CH1 domain-and a light chain variable region (LCVR) that comprises the amino acid sequence set forth in SEQ ID NO: 266, or LCDR1, LCDR2 and LCDR3 of such a LCVR-linked to the CL domain; (11) a heavy chain variable region (HCVR) that comprises the amino acid sequence set forth in SEQ ID NO: 271, or a heavy chain variable region that includes HCDR1, HCDR2 and HCDR3 of such a HCVR-linked to the CH1 domain-and a light chain variable region (LCVR) that comprises the amino acid sequence set forth in SEQ ID NO: 276, or LCDR1, LCDR2 and LCDR3 of such a LCVR-linked to the CL domain; (12) a heavy chain variable region (HCVR) that comprises the amino acid sequence set forth in SEQ ID NO: 281 or 692, or a heavy chain variable region that includes HCDR1, HCDR2 and HCDR3 of such a HCVR-linked to the CH1 domain-and a light chain variable region (LCVR) that comprises the amino acid sequence set forth in SEQ ID NO: 286 or 693, or LCDR1, LCDR2 and LCDR3 of such a LCVR-linked to the CL domain; (13) a heavy chain variable region (HCVR) that comprises the amino acid sequence set forth in SEQ ID NO: 291, or a heavy chain variable region that includes HCDR1, HCDR2 and HCDR3 of such a HCVR-linked to the CH1 domain-and a light chain variable region (LCVR) that comprises the amino acid sequence set forth in SEQ ID NO: 296, or LCDR1, LCDR2 and LCDR3 of such a LCVR-linked to the CL domain; (14) a heavy chain variable region (HCVR) that comprises the amino acid sequence set forth in SEQ ID NO: 301, or a heavy chain variable region that includes HCDR1, HCDR2 and HCDR3 of such a HCVR-linked to the CH1 domain-and a light chain variable region (LCVR) that comprises the amino acid sequence set forth in SEQ ID NO: 306, or LCDR1, LCDR2 and LCDR3 of such a LCVR-linked to the CL domain; (15) a heavy chain variable region (HCVR) that comprises the amino acid sequence set forth in SEQ ID NO: 311 or 694, or a heavy chain variable region that includes HCDR1, HCDR2 and HCDR3 of such a HCVR-linked to the CH1 domain-and a light chain variable region (LCVR) that comprises the amino acid sequence set forth in SEQ ID NO: 316 or 695, or LCDR1, LCDR2 and LCDR3 of such a LCVR-linked to the CL domain; (16) a heavy chain variable region (HCVR) that comprises the amino acid sequence set forth in SEQ ID NO: 321, or a heavy chain variable region that includes HCDR1, HCDR2 and HCDR3 of such a HCVR-linked to the CH1 domain-and a light chain variable region (LCVR) that comprises the amino acid sequence set forth in SEQ ID NO: 326, or LCDR1, LCDR2 and LCDR3 of such a LCVR-linked to the CL domain; (17) a heavy chain variable region (HCVR) that comprises the amino acid sequence set forth in SEQ ID NO: 331 or 696, or a heavy chain variable region that includes HCDR1, HCDR2 and HCDR3 of such a HCVR-linked to the CH1 domain-and a light chain variable region (LCVR) that comprises the amino acid sequence set forth in SEQ ID NO: 336, or LCDR1, LCDR2 and LCDR3 of such a LCVR-linked to the CL domain; (18) a heavy chain variable region (HCVR) that comprises the amino acid sequence set forth in SEQ ID NO: 341, or a heavy chain variable region that includes HCDR1, HCDR2 and HCDR3 of such a HCVR-linked to the CH1 domain-and a light chain variable region (LCVR) that comprises the amino acid sequence set forth in SEQ ID NO: 346, or LCDR1, LCDR2 and LCDR3 of such a LCVR-linked to the CL domain; (19) a heavy chain variable region (HCVR) that comprises the amino acid sequence set forth in SEQ ID NO: 351 or 697, or a heavy chain variable region that includes HCDR1, HCDR2 and HCDR3 of such a HCVR-linked to the CH1 domain-and a light chain variable region (LCVR) that comprises the amino acid sequence set forth in SEQ ID NO: 356 or 698, or LCDR1, LCDR2 and LCDR3 of such a LCVR-linked to the CL domain; (20) a heavy chain variable region (HCVR) that comprises the amino acid sequence set forth in SEQ ID NO: 361 or 699, or a heavy chain variable region that includes HCDR1, HCDR2 and HCDR3 of such a HCVR-linked to the CH1 domain-and a light chain variable region (LCVR) that comprises the amino acid sequence set forth in SEQ ID NO: 366, or LCDR1, LCDR2 and LCDR3 of such a LCVR-linked to the CL domain; (21) a heavy chain variable region (HCVR) that comprises the amino acid sequence set forth in SEQ ID NO: 371 or 700, or a heavy chain variable region that includes HCDR1, HCDR2 and HCDR3 of such a HCVR-linked to the CH1 domain-and a light chain variable region (LCVR) that comprises the amino acid sequence set forth in SEQ ID NO: 376, or LCDR1, LCDR2 and LCDR3 of such a LCVR-linked to the CL domain; (22) a heavy chain variable region (HCVR) that comprises the amino acid sequence set forth in SEQ ID NO: 381, or a heavy chain variable region that includes HCDR1, HCDR2 and HCDR3 of such a HCVR-linked to the CH1 domain-and a light chain variable region (LCVR) that comprises the amino acid sequence set forth in SEQ ID NO: 386, or LCDR1, LCDR2 and LCDR3 of such a LCVR-linked to the CL domain; (23) a heavy chain variable region (HCVR) that comprises the amino acid sequence set forth in SEQ ID NO: 391, or a heavy chain variable region that includes HCDR1, HCDR2 and HCDR3 of such a HCVR-linked to the CH1 domain-and a light chain variable region (LCVR) that comprises the amino acid sequence set forth in SEQ ID NO: 396, or LCDR1, LCDR2 and LCDR3 of such a LCVR-linked to the CL domain; (24) a heavy chain variable region (HCVR) that comprises the amino acid sequence set forth in SEQ ID NO: 401, or a heavy chain variable region that includes HCDR1, HCDR2 and HCDR3 of such a HCVR-linked to the CH1 domain-and a light chain variable region (LCVR) that comprises the amino acid sequence set forth in SEQ ID NO: 406, or LCDR1, LCDR2 and LCDR3 of such a LCVR-linked to the CL domain; (25) a heavy chain variable region (HCVR) that comprises the amino acid sequence set forth in SEQ ID NO: 411, or a heavy chain variable region that includes HCDR1, HCDR2 and HCDR3 of such a HCVR-linked to the CH1 domain-and a light chain variable region (LCVR) that comprises the amino acid sequence set forth in SEQ ID NO: 416, or LCDR1, LCDR2 and LCDR3 of such a LCVR-linked to the CL domain; (26) a heavy chain variable region (HCVR) that comprises the amino acid sequence set forth in SEQ ID NO: 421 or 701, or a heavy chain variable region that includes HCDR1, HCDR2 and HCDR3 of such a HCVR-linked to the CH1 domain-and a light chain variable region (LCVR) that comprises the amino acid sequence set forth in SEQ ID NO: 426, or LCDR1, LCDR2 and LCDR3 of such a LCVR-linked to the CL domain; (27) a heavy chain variable region (HCVR) that comprises the amino acid sequence set forth in SEQ ID NO: 431, or a heavy chain variable region that includes HCDR1, HCDR2 and HCDR3 of such a HCVR-linked to the CH1 domain-and a light chain variable region (LCVR) that comprises the amino acid sequence set forth in SEQ ID NO: 436, or LCDR1, LCDR2 and LCDR3 of such a LCVR-linked to the CL domain; (28) a heavy chain variable region (HCVR) that comprises the amino acid sequence set forth in SEQ ID NO: 441, or a heavy chain variable region that includes HCDR1, HCDR2 and HCDR3 of such a HCVR-linked to the CH1 domain-and a light chain variable region (LCVR) that comprises the amino acid sequence set forth in SEQ ID NO: 446, or LCDR1, LCDR2 and LCDR3 of such a LCVR-linked to the CL domain; (29) a heavy chain variable region (HCVR) that comprises the amino acid sequence set forth in SEQ ID NO: 451, or a heavy chain variable region that includes HCDR1, HCDR2 and HCDR3 of such a HCVR-linked to the CH1 domain-and a light chain variable region (LCVR) that comprises the amino acid sequence set forth in SEQ ID NO: 456, or LCDR1, LCDR2 and LCDR3 of such a LCVR-linked to the CL domain; (30) a heavy chain variable region (HCVR) that comprises the amino acid sequence set forth in SEQ ID NO: 461, or a heavy chain variable region that includes HCDR1, HCDR2 and HCDR3 of such a HCVR-linked to the CH1 domain-and a light chain variable region (LCVR) that comprises the amino acid sequence set forth in SEQ ID NO: 466, or LCDR1, LCDR2 and LCDR3 of such a LCVR-linked to the CL domain; (31) a heavy chain variable region (HCVR) that comprises the amino acid sequence set forth in SEQ ID NO: 471 or 702, or a heavy chain variable region that includes HCDR1, HCDR2 and HCDR3 of such a HCVR-linked to the CH1 domain-and a light chain variable region (LCVR) that comprises the amino acid sequence set forth in SEQ ID NO: 476 or 632, or LCDR1, LCDR2 and LCDR3 of such a LCVR-linked to the CL domain; and/or (32) a heavy chain variable region (HCVR) that comprises the amino acid sequence set forth in SEQ ID NO: 481, or a heavy chain variable region that includes HCDR1, HCDR2 and HCDR3 of such a HCVR-linked to the CH1 domain-and a light chain variable region (LCVR) that comprises the amino acid sequence set forth in SEQ ID NO: 486 or 703, or LCDR1, LCDR2 and LCDR3 of such a LCVR-linked to the CL domain. For example, the CH1 can be SEQ ID NO: 539 or 611.

[0280] In one example, the antibody or antigen-binding fragment thereof or Fab protein can comprise: (23) a heavy chain variable region (HCVR) that comprises the amino acid sequence set forth in SEQ ID NO: 391, or a heavy chain variable region that includes HCDR1, HCDR2 and HCDR3 of such a HCVR-linked to the CH1 domain-and a light chain variable region (LCVR) that comprises the amino acid sequence set forth in SEQ ID NO: 396, or LCDR1, LCDR2 and LCDR3 of such a LCVR-linked to the CL domain; or (25) a heavy chain variable region (HCVR) that comprises the amino acid sequence set forth in SEQ ID NO: 411, or a heavy chain variable region that includes HCDR1, HCDR2 and HCDR3 of such a HCVR-linked to the CH1 domain-and a light chain variable region (LCVR) that comprises the amino acid sequence set forth in SEQ ID NO: 416, or LCDR1, LCDR2 and LCDR3 of such a LCVR-linked to the CL domain. In one example, the Fab protein can comprise a heavy chain variable region (HCVR) that comprises the amino acid sequence set forth in SEQ ID NO: 391, or a heavy chain variable region that includes HCDR1, HCDR2 and HCDR3 of such a HCVR-linked to the CH1 domain-and a light chain variable region (LCVR) that comprises the amino acid sequence set forth in SEQ ID NO: 396, or LCDR1, LCDR2 and LCDR3 of such a LCVR-linked to the CL domain. In one example, the Fab protein can comprise a heavy chain variable region (HCVR) that comprises the amino acid sequence set forth in SEQ ID NO: 411, or a heavy chain variable region that includes HCDR1, HCDR2 and HCDR3 of such a HCVR-linked to the CH1 domain-and a light chain variable region (LCVR) that comprises the amino acid sequence set forth in SEQ ID NO: 416, or LCDR1, LCDR2 and LCDR3 of such a LCVR-linked to the CL domain.

[0281] In one example, the antibody or antigen-binding fragment thereof or Fab protein can comprise: (1) a light chain that comprises the amino acid sequence set forth in SEQ ID NO: 540 and a heavy chain that comprises the amino acid sequence set forth in SEQ ID NO: 541 (31874B); (2) a light chain that comprises the amino acid sequence set forth in SEQ ID NO: 542 and a heavy chain that comprises the amino acid sequence set forth in SEQ ID NO: 543 (31863B); (3) a light chain that comprises the amino acid sequence set forth in SEQ ID NO: 544 and a heavy chain that comprises the amino acid sequence set forth in SEQ ID NO: 545 (69348); (4) a light chain that comprises the amino acid sequence set forth in SEQ ID NO: 546 and a heavy chain that comprises the amino acid sequence set forth in SEQ ID NO: 547 (69340); (5) a light chain that comprises the amino acid sequence set forth in SEQ ID NO: 548 and a heavy chain that comprises the amino acid sequence set forth in SEQ ID NO: 549 (69331); (6) a light chain that comprises the amino acid sequence set forth in SEQ ID NO: 550 and a heavy chain that comprises the amino acid sequence set forth in SEQ ID NO: 551 (69332); (7) a light chain that comprises the amino acid sequence set forth in SEQ ID NO: 552 and a heavy chain that comprises the amino acid sequence set forth in SEQ ID NO: 553 (69326); (8) a light chain that comprises the amino acid sequence set forth in SEQ ID NO: 554 and a heavy chain that comprises the amino acid sequence set forth in SEQ ID NO: 555 (69329); (9) a light chain that comprises the amino acid sequence set forth in SEQ ID NO: 556 and a heavy chain that comprises the amino acid sequence set forth in SEQ ID NO: 557 (69323); (10) a light chain that comprises the amino acid sequence set forth in SEQ ID NO: 558 and a heavy chain that comprises the amino acid sequence set forth in SEQ ID NO: 559 (69305); (11) a light chain that comprises the amino acid sequence set forth in SEQ ID NO: 560 and a heavy chain that comprises the amino acid sequence set forth in SEQ ID NO: 561 (69307); (12) a light chain that comprises the amino acid sequence set forth in SEQ ID NO: 562 and a heavy chain that comprises the amino acid sequence set forth in SEQ ID NO: 563 (12795B); (13) a light chain that comprises the amino acid sequence set forth in SEQ ID NO: 564 and a heavy chain that comprises the amino acid sequence set forth in SEQ ID NO: 565 or SEQ ID NO: 604 or SEQ ID NO: 633 (12798B); (14) a light chain that comprises the amino acid sequence set forth in SEQ ID NO: 566 and a heavy chain that comprises the amino acid sequence set forth in SEQ ID NO: 567 or SEQ ID NO: 605 or SEQ ID NO: 634 (12799B); (15) a light chain that comprises the amino acid sequence set forth in SEQ ID NO: 568 and a heavy chain that comprises the amino acid sequence set forth in SEQ ID NO: 569 (12801B); (16) a light chain that comprises the amino acid sequence set forth in SEQ ID NO: 570 and a heavy chain that comprises the amino acid sequence set forth in SEQ ID NO: 571 (12802B); (17) a light chain that comprises the amino acid sequence set forth in SEQ ID NO: 572 and a heavy chain that comprises the amino acid sequence set forth in SEQ ID NO: 573 (12808B); (18) a light chain that comprises the amino acid sequence set forth in SEQ ID NO: 574 and a heavy chain that comprises the amino acid sequence set forth in SEQ ID NO: 575 (12812B); (19) a light chain that comprises the amino acid sequence set forth in SEQ ID NO: 576 and a heavy chain that comprises the amino acid sequence set forth in SEQ ID NO: 577 (12816B); (20) a light chain that comprises the amino acid sequence set forth in SEQ ID NO: 578 and a heavy chain that comprises the amino acid sequence set forth in SEQ ID NO: 579 (12833B); (21) a light chain that comprises the amino acid sequence set forth in SEQ ID NO: 580 and a heavy chain that comprises the amino acid sequence set forth in SEQ ID NO: 581 (12834B); (22) a light chain that comprises the amino acid sequence set forth in SEQ ID NO: 582 and a heavy chain that comprises the amino acid sequence set forth in SEQ ID NO: 583 (12835B); (23) a light chain that comprises the amino acid sequence set forth in SEQ ID NO: 584 and a heavy chain that comprises the amino acid sequence set forth in SEQ ID NO: 585 or SEQ ID NO: 606 or SEQ ID NO: 635 (12847B); (24) a light chain that comprises the amino acid sequence set forth in SEQ ID NO: 586 and a heavy chain that comprises the amino acid sequence set forth in SEQ ID NO: 587 (12848B); (25) a light chain that comprises the amino acid sequence set forth in SEQ ID NO: 588 and a heavy chain that comprises the amino acid sequence set forth in SEQ ID NO: 589 or SEQ ID NO: 607 or SEQ ID NO: 636 (12843B); (26) a light chain that comprises the amino acid sequence set forth in SEQ ID NO: 590 and a heavy chain that comprises the amino acid sequence set forth in SEQ ID NO: 591 (12844B); (27) a light chain that comprises the amino acid sequence set forth in SEQ ID NO: 592 and a heavy chain that comprises the amino acid sequence set forth in SEQ ID NO: 593 or SEQ ID NO: 608 or SEQ ID NO: 637 (12845B); (28) a light chain that comprises the amino acid sequence set forth in SEQ ID NO: 594 and a heavy chain that comprises the amino acid sequence set forth in SEQ ID NO: 595 or SEQ ID NO: 609 or SEQ ID NO: 638 (12839B); (29) a light chain that comprises the amino acid sequence set forth in SEQ ID NO: 596 and a heavy chain that comprises the amino acid sequence set forth in SEQ ID NO: 597 (12841B); (30) a light chain that comprises the amino acid sequence set forth in SEQ ID NO: 598 and a heavy chain that comprises the amino acid sequence set forth in SEQ ID NO: 599 (12850B); (31) a light chain that comprises the amino acid sequence set forth in SEQ ID NO: 600 and a heavy chain that comprises the amino acid sequence set forth in SEQ ID NO: 601 (69261); or (32) a light chain that comprises the amino acid sequence set forth in SEQ ID NO: 602 and a heavy chain that comprises the amino acid sequence set forth in SEQ ID NO: 603 (69263).

[0282] In one example, the antibody or antigen-binding fragment thereof or Fab protein can comprise: (23) a light chain that comprises the amino acid sequence set forth in SEQ ID NO: 584 and a heavy chain that comprises the amino acid sequence set forth in SEQ ID NO: 585 or SEQ ID NO: 606 or SEQ ID NO: 635 (12847B); or (25) a light chain that comprises the amino acid sequence set forth in SEQ ID NO: 588 and a heavy chain that comprises the amino acid sequence set forth in SEQ ID NO: 589 or SEQ ID NO: 607 or SEQ ID NO: 636 (12843B). In one example, the antibody or antigen-binding fragment thereof or Fab protein can comprise a light chain that comprises the amino acid sequence set forth in SEQ ID NO: 584 and a heavy chain that comprises the amino acid sequence set forth in SEQ ID NO: 585 or SEQ ID NO: 606 or SEQ ID NO: 635 (12847B). In one example, the antibody or antigen-binding fragment thereof or Fab protein can comprise a light chain that comprises the amino acid sequence set forth in SEQ ID NO: 584 and a heavy chain that comprises the amino acid sequence set forth in SEQ ID NO: 635 (12847B). In one example, the antibody or antigen-binding fragment thereof or Fab protein can comprise a light chain that comprises the amino acid sequence set forth in SEQ ID NO: 588 and a heavy chain that comprises the amino acid sequence set forth in SEQ ID NO: 589 or SEQ ID NO: 607 or SEQ ID NO: 636 (12843B).

[0283] In an embodiment, the antigen-binding fragment comprises a Fab protein. In an embodiment, the Fab protein comprises the amino acid sequences set forth in SEQ ID NO: 584 and 635 (or variants thereof) or comprises the amino acid sequences set forth in SEQ ID NO: 588 and 636 (or variants thereof). In an embodiment, the Fab protein comprises the amino acid sequences set forth in SEQ ID NO: 584 and 635 (or variants thereof). In an embodiment, the Fab protein comprises the amino acid sequences set forth in SEQ ID NO: 588 and 636 (or variants thereof).

[0284] “31874B”; “31863B”; “69348”; “69340”; “69331”; “69332”; “69326”; “69329”; “69323”; “69305”; “69307”; “12795B”; “12798B”; “12799B”; “12801B”; “12802B”; “12808B”; “12812B”; “12816B”; “12833B”; “12834B”; “12835B”; “12847B”; “12848B”; “12843B”; “12844B”; “12845B”; “12839B”; “12841B”; “12850B”; “69261”; and “69263” refer to anti-TfR:GAA fusion proteins, e.g., anti-TfR scFv:GAA or anti-TfR Fab:GAA, comprising a light chain variable region comprising the amino acid sequence set forth in SEQ ID NO: 176, 186, 196, 206, 683, 216, 684, 226, 686, 236, 688, 246, 690, 256, 266, 276, 286, 693, 296, 306, 316, 695, 326, 336, 346, 356, 698, 366, 376, 386, 396, 406, 416, 426, 436, 446, 456, 466, 476, 632, 486, or 703 (or a variant thereof), and a heavy chain variable region comprising the amino acid sequence set forth in SEQ ID NO: 171, 680, 181, 681, 191, 682, 201, 211, 221, 685, 231, 687, 241, 689, 251, 261, 691, 271, 281, 692, 291, 301, 311, 694, 321, 331, 696, 341, 351, 697, 361, 699, 371, 700, 381, 391, 401, 411, 421, 701, 431, 441, 451, 461, 471, 702, or 481 (or a variant thereof); which, in the case of an scFv, can be fused together (in either order), e.g., by a peptide linker (e.g., (G₄S)₃(SEQ ID NO: 616)) (G₄S=SEQ ID NO: 537), respectively; or that comprise a V_{H} that comprises the CDRs thereof (CDR-H1 (or a variant thereof), CDR-H2 (or a variant thereof) and CDR-H3 (or a variant thereof)) and/or a V_{L} that comprises the CDRs thereof (CDR-L1 (or a variant thereof), CDR-L2 (or a variant thereof) and CDR-L3 (or a variant thereof)), wherein the V_{H} fused to the V_{L} or the V_{L} fused to the V_{H}, in the case of an scFv, can be fused, e.g., by a peptide linker (e.g., (G₄S)₂(SEQ ID NO: 617)) (G₄S=SEQ ID NO: 537), to a GAA polypeptide.

[0285] In some embodiments, the anti-TfR antigen-binding protein described herein comprises a humanized antibody or antigen binding fragment thereof, murine antibody or antigen binding fragment thereof, chimeric antibody or antigen binding fragment thereof, monoclonal antibody or antigen binding fragment thereof (e.g., monovalent Fab′, divalent Fab2, F(ab)′3 fragments, single-chain variable fragment (scFv), bis-scFv, (scFv)2, diabody, bivalent antibody, one-armed antibody, minibody, nanobody, triabody, tetrabody, disulfide stabilized Fv protein (dsFv), single-domain antibody (sdAb), Ig NAR, camelid antibody or antigen binding fragment thereof, bispecific antibody or biding fragment thereof, (e.g., bisscFv, or a bi-specific T-cell engager (BiTE)), trispecific antibody (e.g., F(ab)′3 fragments or a triabody), or a chemically modified derivative thereof. In some embodiments, the anti-TfR antigen-binding protein can be bivalent. In some embodiments, the anti-TfR antigen-binding protein can be monovalent (e.g., one-arm antibody).

[0286] The term “humanized antibody,” as used herein, includes antibodies in which CDR sequences derived from the germline of another mammalian species, such as a mouse, have been grafted onto human framework sequences, or otherwise modified to increase their similarity to antibody variants produced naturally in humans.

[0287] In some cases, the anti-TfR antigen-binding protein is an antibody which comprises one or more mutations in a framework region, e.g., in the CH1 domain, CH2 domain, CH3 domain, hinge region, or a combination thereof. In some embodiments, the one or more mutations are to stabilize the antibody and/or to increase half-life. In some embodiments, the one or more mutations are to modulate Fc receptor interactions, to reduce or eliminate Fc effector functions such as FcγR, antibody-dependent cell-mediated cytotoxicity (ADCC), or complement-dependent cytotoxicity (CDC). In additional embodiments, the one or more mutations are to modulate glycosylation.

[0288] In some embodiments, one, two or more mutations (e.g., amino acid substitutions) are introduced into the Fc region of an antibody described herein (e.g., in a CH2 domain (residues 231-340 of human IgG1) and/or CH3 domain (residues 341-447 of human IgG1) and/or the hinge region, with numbering according to the Kabat numbering system (e.g., the EU index in Kabat)) to alter one or more functional properties of the antibody, such as serum half-life, complement fixation, Fc receptor binding and/or antigen-dependent cellular cytotoxicity. In some embodiments, one, two or more mutations (e.g., amino acid substitutions) are introduced into the hinge region of the Fc region (CH1 domain) such that the number of cysteine residues in the hinge region are altered (e.g., increased or decreased) as described in, e.g., U.S. Pat. No. 5,677,425. The number of cysteine residues in the hinge region of the CH1 domain can be altered to, e.g., facilitate assembly of the light and heavy chains, or to alter (e.g., increase or decrease) the stability of the antibody or to facilitate linker conjugation.

[0289] In some embodiments, one, two or more amino acid mutations (i.e., substitutions, insertions or deletions) are introduced into an IgG constant domain, or FcRn-binding fragment thereof (preferably an Fc or hinge-Fc domain fragment) to alter (e.g., decrease or increase) half-life of the antibody in vivo. See, e.g., PCT Publication Nos. WO 02/060919; WO 98/23289; and WO 97/34631; and U.S. Pat. Nos. 5,869,046, 6,121,022, 6,277,375 and 6,165,745 for examples of mutations that will alter (e.g., decrease or increase) the half-life of an antibody in vivo. In some embodiments, the Fc region comprises a mutation at residue position L234, L235, or a combination thereof. In some embodiments, the mutations comprise L234 and L235. In some embodiments, the mutations comprise L234A and L235A.

[0290] The anti-TfR antibodies and antigen-binding fragments described herein may be modified after translation, e.g., glycosylated.

[0291] For example, antibodies and antigen-binding fragments described herein may be glycosylated (e.g., N-glycosylated and/or O-glycosylated) or aglycosylated. Typically, antibodies and antigen-binding fragments are glycosylated at the conserved residue N297 of the IgG Fc domain. Some antibodies and fragments include one or more additional glycosylation sites in a variable region. In an embodiment, the glycosylation site is in the following context: FN₂₉₇S or YN₂₉₇S.

[0292] In an embodiment, said glycosylation is any one or more of three different N-glycan types: high mannose, complex and/or hybrid that are found on IgGs with their respective linkage. Complex and hybrid types exist with core fucosylation, addition of a fucose residue to the innermost N-acetylglucosamine, and without core fucosylation.

[0293] In some cases, the anti-TfR antigen-binding protein is an aglycosylated antibody, i.e., an antibody that does not comprise a glycosylation sequence that might interfere with a transglutamination reaction, for instance an antibody that does not have a saccharide group at N180 and/or N297 on one or more heavy chains. In particular embodiments, an antibody heavy chain has an N180 mutation. In other words, the antibody is mutated to no longer have an asparagine residue at position 180 according to the EU numbering system as disclosed by Kabat et al. In particular embodiments, an antibody heavy chain has an N180Q mutation. In particular embodiments, an antibody heavy chain has an N297 mutation. In particular embodiments, an antibody heavy chain has an N297Q or an N297D mutation. Antibodies comprising such above-described mutations can be prepared by site-directed mutagenesis to remove or disable a glycosylation sequence or by site-directed mutagenesis to insert a glutamine residue at site apart from any interfering glycosylation site or any other interfering structure. Such antibodies also can be isolated from natural or artificial sources. Aglycosylated antibodies also include antibodies comprising a T299 or S298P or other mutations, or combinations of mutations that result in a lack of glycosylation.

[0294] In some cases, the antigen-binding protein is a deglycosylated antibody, i.e., an antibody in which a saccharide group at is removed to facilitate transglutaminase-mediated conjugation. Saccharides include, but are not limited to, N-linked oligosaccharides. In some embodiments, deglycosylation is performed at residue N180. In some embodiments, deglycosylation is performed at residue N297. In some embodiments, removal of saccharide groups is accomplished enzymatically, included but not limited to via PNGase.

[0295] In an embodiment, an antibody or fragment described herein is afucosylated.

[0296] The antibodies and antigen-binding fragments described herein may also be post-translationally modified in other ways including, for example: Glu or Gln cyclization at N-terminus; Loss of positive N-terminal charge; Lys variants at C-terminus; Deamidation (Asn to Asp); Isomerization (Asp to isoAsp); Deamidation (Gln to Glu); Oxidation (Cys, His, Met, Tyr, Trp); and/or Disulfide bond heterogeneity (Shuffling, thioether and trisulfide formation).

[0297] In some embodiments, an antibody disclosed herein Q295 which can be native to the antibody heavy chain sequence. In some embodiments, an antibody heavy chain disclosed herein may comprise Q295. In some embodiments, an antibody heavy chain disclosed herein may comprise Q295 and an amino acid substitution N297D.

[0298] According to certain embodiments of the present disclosure, anti-TfR antibodies and antigen-binding fragments are provided comprising an Fc domain comprising one or more mutations which enhance or diminish antibody binding to the FcRn receptor, e.g., at acidic pH as compared to neutral pH. For example, the present disclosure includes anti-TfR antibodies comprising a mutation in the CH2 or a CH3 region of the Fc domain, wherein the mutation(s) increases the affinity of the Fc domain to FcRn in an acidic environment (e.g., in an endosome where pH ranges from about 5.5 to about 6.0). Such mutations may result in an increase in serum half-life of the antibody when administered to an animal.

[0299] Non-limiting examples of such Fc modifications include, e.g., a modification at position:
[0300] 250 (e.g., E or Q);
[0301] 250 and 428 (e.g., L or F);
[0302] 252 (e.g., L/Y/F/W or T),
[0303] 254 (e.g., S or T), and/or
[0304] 256 (e.g., S/R/Q/E/D or T);
   and/or a modification at position:
[0305] 428 and/or 433 (e.g., H/L/R/S/P/Q or K), and/or
[0306] 434 (e.g., A, W, H, F or Y);
   and/or a modification at position:
[0307] 250 and/or 428;
   and/or a modification at position:
[0308] 307 or 308 (e.g., 308F, V308F), and/or
[0309] 434.

[0310] In an embodiment, the modification comprises:
[0311] a 428L (e.g., M428L) and 434S (e.g., N434S) modification;
[0312] a 428L, 259I (e.g., V259I), and 308F (e.g., V308F) modification;
[0313] a 433K (e.g., H433K) and a 434 (e.g., 434Y) modification;
[0314] a 252, 254, and 256 (e.g., 252Y, 254T, and 256E) modification;
[0315] a 250Q and 428L modification (e.g., T250Q and M428L); and/or
[0316] a 307 and/or 308 modification (e.g., 308F or 308P).

[0317] In yet another embodiment, the modification comprises a 265A (e.g., D265A) and/or a 297A (e.g., N297A) modification.

[0318] For example, the present disclosure includes anti-TfR antibodies comprising an Fc domain comprising one or more pairs or groups of mutations selected from the group consisting of:
[0319] 250Q and 248L (e.g., T250Q and M248L);
[0320] 252Y, 254T and 256E (e.g., M252Y, S254T and T256E);
[0321] 2571 and 3111 (e.g., P2571 and Q3111);
[0322] 2571 and 434H (e.g., P2571 and N434H);
[0323] 376V and 434H (e.g., D376V and N434H);
[0324] 307A, 380A and 434A (e.g., T307A, E380A and N434A);
[0325] 428L and 434S (e.g., M428L and N434S); and
[0326] 433K and 434F (e.g., H433K and N434F).

[0327] In an embodiment, the heavy chain constant domain is gamma4 comprising an S228P and/or S108P mutation. See Angal et al., A single amino acid substitution abolishes the heterogeneity of chimeric mouse/human (IgG4) antibody, Mol Immunol. 1993 January; 30(1):105-108.

[0328] All possible combinations of the foregoing Fc domain mutations, and other mutations within the antibody variable domains disclosed herein, are contemplated within the scope of the present disclosure.

[0329] The anti-TfR antibodies described herein may comprise a modified Fc domain having reduced effector function. As used herein, a “modified Fc domain having reduced effector function” means any Fc portion of an immunoglobulin that has been modified, mutated, truncated, etc., relative to a wild-type, naturally occurring Fc domain such that a molecule comprising the modified Fc exhibits a reduction in the severity or extent of at least one effect selected from the group consisting of cell killing (e.g., ADCC and/or CDC), complement activation, phagocytosis and opsonization, relative to a comparator molecule comprising the wild-type, naturally occurring version of the Fc portion. In certain embodiments, a “modified Fc domain having reduced effector function” is an Fc domain with reduced or attenuated binding to an Fc receptor (e.g., FcγR).

[0330] In certain embodiments, the modified Fc domain is a variant IgG1 Fc or a variant IgG4 Fc comprising a substitution in the hinge region. For example, a modified Fc for use in the context of the present disclosure may comprise a variant IgG1 Fc wherein at least one amino acid of the IgG1 Fc hinge region is replaced with the corresponding amino acid from the IgG2 Fc hinge region. Alternatively, a modified Fc for use in the context of the present disclosure may comprise a variant IgG4 Fc wherein at least one amino acid of the IgG4 Fc hinge region is replaced with the corresponding amino acid from the IgG2 Fc hinge region. Non-limiting, exemplary modified Fc regions that can be used in the context of the present disclosure are set forth in US Patent Application Publication No. 2014/0243504, the disclosure of which is hereby incorporated by reference in its entirety, as well as any functionally equivalent variants of the modified Fc regions set forth therein.

[0331] Also provided herein are antigen-binding proteins, antibodies or antigen-binding fragments, comprising a HCVR set forth herein and a chimeric heavy chain constant (CH) region, wherein the chimeric CH region comprises segments derived from the CH regions of more than one immunoglobulin isotype. For example, the antibodies of the disclosure may comprise a chimeric CH region comprising part or all of a CH2 domain derived from a human IgG1, human IgG2 or human IgG4 molecule, combined with part or all of a CH3 domain derived from a human IgG1, human IgG2 or human IgG4 molecule. According to certain embodiments, the antibodies provided herein comprise a chimeric CH region having a chimeric hinge region. For example, a chimeric hinge may comprise an “upper hinge” amino acid sequence (amino acid residues from positions 216 to 227 according to EU numbering) derived from a human IgG1, a human IgG2 or a human IgG4 hinge region, combined with a “lower hinge” sequence (amino acid residues from positions 228 to 236 according to EU numbering) derived from a human IgG1, a human IgG2 or a human IgG4 hinge region. According to certain embodiments, the chimeric hinge region comprises amino acid residues derived from a human IgG1 or a human IgG4 upper hinge and amino acid residues derived from a human IgG2 lower hinge. An antibody comprising a chimeric CH region as described herein may, in certain embodiments, exhibit modified Fc effector functions without adversely affecting the therapeutic or pharmacokinetic properties of the antibody. See, e.g., WO2014/022540.

[0332] Other modified Fc domains and Fc modifications that can be used in the context of the present disclosure include any of the modifications as set forth in US2014/0171623; U.S. Pat. No. 8,697,396; US2014/0134162; WO2014/043361, the disclosures of which are hereby incorporated by reference in their entireties. Methods of constructing antibodies or other antigen-binding fusion proteins comprising a modified Fc domain as described herein are known in the art.

[0333] In some embodiments, the anti-TfR antibodies and antigen-binding fragments described herein comprise an Fc domain comprising one or more mutations in the CH2 and/or CH3 regions that generate a separate TfR binding site.

[0334] In an embodiment, the CH2 region comprises one or more amino acid mutations, or a combination thereof, selected from the following: a) position 47 is Glu, Gly, Gln, Ser, Ala, Asn, Tyr, or Trp; position 49 is Ile, Val, Asp, Glu, Thr, Ala, or Tyr; position 56 is Asp, Pro, Met, Leu, Ala, Asn, or Phe; position 58 is Arg, Ser, Ala, or Gly; position 59 is Tyr, Trp, Arg, or Val; position 60 is Glu; position 61 is Trp or Tyr; position 62 is Gln, Tyr, His, Ile, Phe, Val, or Asp; and position 63 is Leu, Trp, Arg, Asn, Tyr, or Val; b) position 39 is Pro, Phe, Ala, Met, or Asp; position 40 is Gln, Pro, Arg, Lys, Ala, Ile, Leu, Glu, Asp, or Tyr; position 41 is Thr, Ser, Gly, Met, Val, Phe, Trp, or Leu; position 42 is Pro, Val, Ala, Thr, or Asp; position 43 is Pro, Val, or Phe; position 44 is Trp, Gln, Thr, or Glu; position 68 is Glu, Val, Thr, Leu, or Trp; position 70 is Tyr, His, Val, or Asp; position 71 is Thr, His, Gln, Arg, Asn, or Val; and position 72 is Tyr, Asn, Asp, Ser, or Pro; c) position 41 is Val or Asp; position 42 is Pro, Met, or Asp; position 43 is Pro or Trp; position 44 is Arg, Trp, Glu, or Thr; position 45 is Met, Tyr, or Trp; position 65 is Len or Trp; position 66 is Thr, Val, Ile, or Lys; position 67 is Ser, Lys, Ala, or Leu; position 69 is His, Leu, or Pro; and position 73 is Val or Trp; or d) position 45 is Trp, Val, Ile, or Ala; position 47 is Trp or Gly; position 49 is Tyr, Arg, or Glu; position 95 is Ser, Arg, or Gln; position 97 is Val, Ser, or Phe; position 99 is Ile, Ser, or Trp; position 102 is Trp, Thr, Ser, Arg, or Asp; position 103 is Trp; and position 104 is Ser, Lys, Arg, or Val; wherein the substitutions and the positions are determined with reference to amino acids 4-113 of

(SEQ ID NO: 807)
PCPAPELLGGPSVFLFPPKPKDTLMISRTPEVTCVVVDVSHEDPEVK
FNWYVDGVEVHNAKTKPREEQYNSTYRVVSVLTVLHQDWLNGKEYKC
KVSNKALPAPIEKTISKAKGQPREPQVYTLPPSRDELTKNQVSLTCL
VKGFYPSDIAVEWESNGQPENNYKTTPPVLDSDGSFFLYSKLTVDKS
RWQQGNVFSCSVMHEALHNHYTQKSLSLSPGK.

[0335] In an embodiment, the CH3 region comprises one or more amino acid mutations, or a combination thereof, selected from the following: position 153 is Trp, Leu, or Glu; position 157 is Tyr or Phe; position 159 is Thr; position 160 is Glu; position 161 is Trp; position 162 is Ser, Ala, Val, or Asn; position 163 is Ser or Asn; position 186 is Thr or Ser; position 188 is Glu or Ser; position 189 is Glu; and position 194 is Phe; or b) position 118 is Phe or Ile; position 119 is Asp, Glu, Gly, Ala, or Lys; position 120 is Tyr, Met, Leu, Ile, or Asp; position 122 is Thr or Ala; position 210 is Gly; position 211 is Phe; position 212 is His, Tyr, Ser, or Phe; and position 213 is Asp; wherein the substitutions and the positions are determined with reference to amino acids 114-220 of SEQ ID NO: 807.

[0336] In some embodiments, the CH3 region comprises one or more mutations, or a combination thereof, selected from the following: position 384 is Leu, Tyr, Met, or Val; position 386 is Leu, Thr, His, or Pro; position 387 is Val, Pro, or an acidic amino acid; position 388 is Trp; position 389 is Val, Ser, or Ala; position 413 is Glu, Ala, Ser, Leu, Thr, or Pro; position 416 is Thr or an acidic amino acid; and position 421 is Trp, Tyr, His, or Phe, according to EU numbering. In an embodiment, the CH3 region comprises one or more amino acid mutations, or a combination thereof, selected from the following: a) position 380 is Trp, Leu, or Glu; position 384 is Tyr or Phe; position 386 is Thr; position 387 is Glu; position 388 is Trp; position 389 is Ser, Ala, Val, or Asn; position 390 is Ser or Asn; position 413 is Thr or Ser; position 415 is Glu or Ser; position 416 is Glu; and position 421 is Phe.

[0337] In some embodiments, the CH3 region comprises one or more mutations, or a combination thereof, selected from the following: a) Phe at position 382, Tyr at position 383, Asp at position 384, Asp at position 385, Ser at position 386, Lys at position 387, Len at position 388, Thr at position 389, Pro at position 419, Arg at position 420, Gly at position 421, Len at position 422, Ala at position 424, Glu at position 426, Tyr at position 438, Len at position 440, Gly at position 442, and Glu at position 443; b) Phe at position 382, Tyr at position 383, Gly at position 384, N at position 385, Ala at position 386, Lys at position 387, Thr at position 389, Len at position 422, Ala at position 424, Glu at position 426, Tyr at position 438, Len at position 440; c) Phe at position 382, Tyr at position 383, Glu at position 384, Ala at position 385, Lys at position 387, Len at position 388, Len at position 422, Ala at position 424, Glu at position 426, Tyr at position 438, Len at position 440; d) Phe at position 382, Glu at position 384, Ser at position 386, Lys at position 387, Thr at position 389, Len at position 422, Ala at position 424, Glu at position 426, Tyr at position 438, Len at position 440; e) Phe at position 382, Gly at position 384, Ala at position 385, Lys at position 387, Ser at position 389, Len at position 422, Ala at position 424, Glu at position 426, Tyr at position 438, Len at position 440; f) Phe at position 382, Gly at position 384, Ala at position 385, Lys at position 387, Len at position 388, Thr at position 389, Len at position 422, Ala at position 424, Glu at position 426, Tyr at position 438, Len at position 440; wherein the positions are determined according to EU numbering.

[0338] Additional mutations in CH2 and/or CH3 regions that can introduce non-native TfR binding sites into the antigen-binding proteins descried herein include those described in US Patent Application Publication Nos. 2020/0223935, 2020/0369746, 2021/0130485, 2022/0017634; and PCT Application Publications Nos. WO2023/279099, WO2023/114499 and WO2023/114510, which are incorporated herein by reference in their entireties.

[0339] The TfR-binding delivery domain coding sequences in the constructs disclosed herein may include one or more modifications such as codon optimization (e.g., to human codons), depletion of CpG dinucleotides, mutation of cryptic splice sites, addition of one or more glycosylation sites, or any combination thereof. CpG dinucleotides in a construct can limit the therapeutic utility of the construct. First, unmethylated CpG dinucleotides can interact with host toll-like receptor-9 (TLR-9) to stimulate innate, proinflammatory immune responses. Second, once the CpG dinucleotides become methylated, they can result in the suppression of transgene expression coordinated by methyl-CpG binding proteins. Cryptic splice sites are sequences in a pre-messenger RNA that are not normally used as splice sites, but that can be activated, for example, by mutations that either inactivate canonical splice sites or create splice sites where one did not exist before. Accurate splice site selection is critical for successful gene expression, and removal of cryptic splice sites can favor use of the normal or intended splice site.

[0340] In one example, a TfR-binding delivery domain coding sequence in a construct disclosed herein has one or more cryptic splice sites mutated or removed. In another example, a TfR-binding delivery domain coding sequence in a construct disclosed herein has all identified cryptic splice sites mutated or removed. In another example, a TfR-binding delivery domain coding sequence in a construct disclosed herein has one or more CpG dinucleotides removed (i.e., is CpG depleted). In another example, a TfR-binding delivery domain coding sequence in a construct disclosed herein has all CpG dinucleotides removed (i.e., is fully CpG depleted). In another example, a TfR-binding delivery domain coding sequence in a construct disclosed herein is codon optimized (e.g., codon optimized for expression in a human or mammal). In a specific example, a CDTfR63-binding delivery domain coding sequence in a construct disclosed herein has one or more CpG dinucleotides removed (i.e., is CpG depleted) and has one or more cryptic splice sites mutated or removed. In another specific example, a TfR-binding delivery domain coding sequence in a construct disclosed herein has all CpG dinucleotides removed and has one or more or all identified cryptic splice sites mutated or removed. In another specific example, a TfR-binding delivery domain coding sequence in a construct disclosed herein has one or more CpG dinucleotides removed (i.e., is CpG depleted) and is codon optimized (e.g., codon optimized for expression in a human or mammal). In another specific example, a TfR-binding delivery domain coding sequence in a construct disclosed herein has all CpG dinucleotides removed (i.e., is fully CpG depleted) and is codon optimized (e.g., codon optimized for expression in a human or mammal).

[0341] Various anti-TfR scFv coding sequences are provided. In one example, the anti-TfR scFv coding sequence encodes an anti-TfR scFv protein (or an anti-TfR scFv protein comprising a sequence) at least 90%, at least 91%, at least 92%, at least 93%, at least 94%, at least 95%, at least 96%, at least 97%, at least 98%, at least 99%, at least 99.5%, or 100% identical to any one of SEQ ID NOS: 492-523 (and, e.g., retaining TfR-binding activity). Optionally, the anti-TfR scFv coding sequence encodes an anti-TfR scFv protein (or an anti-TfR scFv protein comprising a sequence) at least 95%, at least 96%, at least 97%, at least 98%, at least 99%, at least 99.5%, or 100% identical to any one of SEQ ID NOS: 492-523 (and, e.g., retaining TfR-binding activity). Optionally, the anti-TfR scFv coding sequence in the above examples encodes an anti-TfR scFv protein (or an anti-TfR scFv protein comprising a sequence) at least 99%, at least 99.5%, or 100% identical to any one of SEQ ID NOS: 492-523 (and, e.g., retaining TfR-binding activity). Optionally, the anti-TfR scFv coding sequence in the above examples encodes an anti-TfR scFv protein comprising the sequence set forth in any one of SEQ ID NOS: 492-523. Optionally, the anti-TfR scFv coding sequence in the above examples encodes an anti-TfR scFv protein consisting essentially of the sequence set forth in any one of SEQ ID NOS: 492-523. Optionally, the anti-TfR scFv coding sequence in the above examples encodes an anti-TfR scFv protein consisting of the sequence set forth in any one of SEQ ID NOS: 492-523.

[0342] Various anti-TfR scFv coding sequences are provided. In one example, the anti-TfR scFv coding sequence is (or comprises a sequence) at least 90%, at least 91%, at least 92%, at least 93%, at least 94%, at least 95%, at least 96%, at least 97%, at least 98%, at least 99%, at least 99.5%, or 100% identical to any one of SEQ ID NOS: 524-536. In another example, the anti-TfR scFv coding sequence is (or comprises a sequence) at least 95%, at least 96%, at least 97%, at least 98%, at least 99%, at least 99.5%, or 100% identical to any one of SEQ ID NOS: 524-536. In another example, the anti-TfR scFv coding sequence is (or comprises a sequence) at least 99%, at least 99.5%, or 100% identical to any one of SEQ ID NOS: 524-536. In another example, the anti-TfR scFv coding sequence comprises the sequence set forth in any one of SEQ ID NOS: 524-536. In another example, the anti-TfR scFv coding sequence consists essentially of the sequence set forth in any one of SEQ ID NOS: 524-536. In another example, the anti-TfR scFv coding sequence consists of the sequence set forth in any one of SEQ ID NOS: 524-536. Optionally, the anti-TfR scFv coding sequence encodes an anti-TfR scFv protein (or an anti-TfR scFv protein comprising a sequence) at least 90%, at least 91%, at least 92%, at least 93%, at least 94%, at least 95%, at least 96%, at least 97%, at least 98%, at least 99%, at least 99.5%, or 100% identical to any one of SEQ ID NOS: 494, 503, 505, and 508 (and, e.g., retaining TfR-binding activity). Optionally, the anti-TfR scFv coding sequence encodes an anti-TfR scFv protein (or an anti-TfR scFv protein comprising a sequence) at least 95%, at least 96%, at least 97%, at least 98%, at least 99%, at least 99.5%, or 100% identical to any one of SEQ ID NOS: 494, 503, 505, and 508 (and, e.g., retaining TfR-binding activity). Optionally, the anti-TfR scFv coding sequence in the above examples encodes an anti-TfR scFv protein (or an anti-TfR scFv protein comprising a sequence) at least 99%, at least 99.5%, or 100% identical to any one of SEQ ID NOS: 494, 503, 505, and 508 (and, e.g., retaining TfR-binding activity). Optionally, the anti-TfR scFv coding sequence in the above examples encodes an anti-TfR scFv protein comprising the sequence set forth in any one of SEQ ID NOS: 494, 503, 505, and 508. Optionally, the anti-TfR scFv coding sequence in the above examples encodes an anti-TfR scFv protein consisting essentially of the sequence set forth in any one of SEQ ID NOS: 494, 503, 505, and 508. Optionally, the anti-TfR scFv coding sequence in the above examples encodes an anti-TfR scFv protein consisting of the sequence set forth in any one of SEQ ID NOS: 494, 503, 505, and 508.

[0343] Various anti-TfR scFv coding sequences are provided. In one example, the anti-TfR scFv coding sequence is (or comprises a sequence) at least 90%, at least 91%, at least 92%, at least 93%, at least 94%, at least 95%, at least 96%, at least 97%, at least 98%, at least 99%, at least 99.5%, or 100% identical to any one of SEQ ID NOS: 530-532 and 536. In another example, the anti-TfR scFv coding sequence is (or comprises a sequence) at least 95%, at least 96%, at least 97%, at least 98%, at least 99%, at least 99.5%, or 100% identical to any one of SEQ ID NOS: 530-532 and 536. In another example, the anti-TfR scFv coding sequence is (or comprises a sequence) at least 99%, at least 99.5%, or 100% identical to any one of SEQ ID NOS: 530-532 and 536. In another example, the anti-TfR scFv coding sequence comprises the sequence set forth in any one of SEQ ID NOS: 530-532 and 536. In another example, the anti-TfR scFv coding sequence consists essentially of the sequence set forth in any one of SEQ ID NOS: 530-532 and 536. In another example, the anti-TfR scFv coding sequence consists of the sequence set forth in any one of SEQ ID NOS: 530-532 and 536. Optionally, the anti-TfR scFv coding sequence encodes an anti-TfR scFv protein (or an anti-TfR scFv protein comprising a sequence) at least 90%, at least 91%, at least 92%, at least 93%, at least 94%, at least 95%, at least 96%, at least 97%, at least 98%, at least 99%, at least 99.5%, or 100% identical to SEQ ID NO: 508 (and, e.g., retaining TfR-binding activity). Optionally, the anti-TfR scFv coding sequence encodes an anti-TfR scFv protein (or an anti-TfR scFv protein comprising a sequence) at least 95%, at least 96%, at least 97%, at least 98%, at least 99%, at least 99.5%, or 100% identical to SEQ ID NO: 508 (and, e.g., retaining TfR-binding activity). Optionally, the anti-TfR scFv coding sequence in the above examples encodes an anti-TfR scFv protein (or an anti-TfR scFv protein comprising a sequence) at least 99%, at least 99.5%, or 100% identical to SEQ ID NO: 508 (and, e.g., retaining TfR-binding activity). Optionally, the anti-TfR scFv coding sequence in the above examples encodes an anti-TfR scFv protein comprising the sequence set forth in SEQ ID NO: 508. Optionally, the anti-TfR scFv coding sequence in the above examples encodes an anti-TfR scFv protein consisting essentially of the sequence set forth in SEQ ID NO: 508. Optionally, the anti-TfR scFv coding sequence in the above examples encodes an anti-TfR scFv protein consisting of the sequence set forth in SEQ ID NO: 508.

[0344] Various codon optimized anti-TfR scFv coding sequences are provided. The anti-TfR scFv coding sequence can be, for example, CpG-depleted (e.g., fully CpG depleted) and/or codon optimized (e.g., CpG depleted (e.g., fully CpG-depleted) and codon optimized). In one example, the anti-TfR scFv coding sequence is (or comprises a sequence) at least 90%, at least 91%, at least 92%, at least 93%, at least 94%, at least 95%, at least 96%, at least 97%, at least 98%, at least 99%, at least 99.5%, or 100% identical to any one of SEQ ID NOS: 524-532. In another example, the anti-TfR scFv coding sequence is (or comprises a sequence) at least 95%, at least 96%, at least 97%, at least 98%, at least 99%, at least 99.5%, or 100% identical to any one of SEQ ID NOS: 524-532. In another example, the anti-TfR scFv coding sequence is (or comprises a sequence) at least 99%, at least 99.5%, or 100% identical to any one of SEQ ID NOS: 524-532. In another example, the anti-TfR scFv coding sequence comprises the sequence set forth in any one of SEQ ID NOS: 524-532. In another example, the anti-TfR scFv coding sequence consists essentially of the sequence set forth in any one of SEQ ID NOS: 524-532. In another example, the anti-TfR scFv coding sequence consists of the sequence set forth in any one of SEQ ID NOS: 524-532. Optionally, the anti-TfR scFv coding sequence encodes an anti-TfR scFv protein (or an anti-TfR scFv protein comprising a sequence) at least 90%, at least 91%, at least 92%, at least 93%, at least 94%, at least 95%, at least 96%, at least 97%, at least 98%, at least 99%, at least 99.5%, or 100% identical to any one of SEQ ID NOS: 494, 503, 505, and 508 (and, e.g., retaining TfR-binding activity). Optionally, the anti-TfR scFv coding sequence encodes an anti-TfR scFv protein (or an anti-TfR scFv protein comprising a sequence) at least 95%, at least 96%, at least 97%, at least 98%, at least 99%, at least 99.5%, or 100% identical to any one of SEQ ID NOS: 494, 503, 505, and 508 (and, e.g., retaining TfR-binding activity). Optionally, the anti-TfR scFv coding sequence in the above examples encodes an anti-TfR scFv protein (or an anti-TfR scFv protein comprising a sequence) at least 99%, at least 99.5%, or 100% identical to any one of SEQ ID NOS: 494, 503, 505, and 508 (and, e.g., retaining TfR-binding activity). Optionally, the anti-TfR scFv coding sequence in the above examples encodes an anti-TfR scFv protein comprising the sequence set forth in any one of SEQ ID NOS: 494, 503, 505, and 508. Optionally, the anti-TfR scFv coding sequence in the above examples encodes an anti-TfR scFv protein consisting essentially of the sequence set forth in any one of SEQ ID NOS: 494, 503, 505, and 508. Optionally, the anti-TfR scFv coding sequence in the above examples encodes an anti-TfR scFv protein consisting of the sequence set forth in any one of SEQ ID NOS: 494, 503, 505, and 508.

[0345] Various codon optimized anti-TfR scFv coding sequences are provided. The anti-TfR scFv coding sequence can be, for example, CpG-depleted (e.g., fully CpG depleted) and/or codon optimized (e.g., CpG depleted (e.g., fully CpG-depleted) and codon optimized). In one example, the anti-TfR scFv coding sequence is (or comprises a sequence) at least 90%, at least 91%, at least 92%, at least 93%, at least 94%, at least 95%, at least 96%, at least 97%, at least 98%, at least 99%, at least 99.5%, or 100% identical to any one of SEQ ID NOS: 530-532. In another example, the anti-TfR scFv coding sequence is (or comprises a sequence) at least 95%, at least 96%, at least 97%, at least 98%, at least 99%, at least 99.5%, or 100% identical to any one of SEQ ID NOS: 530-532. In another example, the anti-TfR scFv coding sequence is (or comprises a sequence) at least 99%, at least 99.5%, or 100% identical to any one of SEQ ID NOS: 530-532. In another example, the anti-TfR scFv coding sequence comprises the sequence set forth in any one of SEQ ID NOS: 530-532. In another example, the anti-TfR scFv coding sequence consists essentially of the sequence set forth in any one of SEQ ID NOS: 530-532. In another example, the anti-TfR scFv coding sequence consists of the sequence set forth in any one of SEQ ID NOS: 530-532. Optionally, the anti-TfR scFv coding sequence encodes an anti-TfR scFv protein (or an anti-TfR scFv protein comprising a sequence) at least 90%, at least 91%, at least 92%, at least 93%, at least 94%, at least 95%, at least 96%, at least 97%, at least 98%, at least 99%, at least 99.5%, or 100% identical to SEQ ID NO: 508 (and, e.g., retaining TfR-binding activity). Optionally, the anti-TfR scFv coding sequence encodes an anti-TfR scFv protein (or an anti-TfR scFv protein comprising a sequence) at least 95%, at least 96%, at least 97%, at least 98%, at least 99%, at least 99.5%, or 100% identical to SEQ ID NO: 508 (and, e.g., retaining TfR-binding activity). Optionally, the anti-TfR scFv coding sequence in the above examples encodes an anti-TfR scFv protein (or an anti-TfR scFv protein comprising a sequence) at least 99%, at least 99.5%, or 100% identical to SEQ ID NO: 508 (and, e.g., retaining TfR-binding activity). Optionally, the anti-TfR scFv coding sequence in the above examples encodes an anti-TfR scFv protein comprising the sequence set forth in SEQ ID NO: 508. Optionally, the anti-TfR scFv coding sequence in the above examples encodes an anti-TfR scFv protein consisting essentially of the sequence set forth in SEQ ID NO: 508. Optionally, the anti-TfR scFv coding sequence in the above examples encodes an anti-TfR scFv protein consisting of the sequence set forth in SEQ ID NO: 508.

[0346] In one example, the anti-TfR scFv coding sequence is (or comprises a sequence) at least 90%, at least 91%, at least 92%, at least 93%, at least 94%, at least 95%, at least 96%, at least 97%, at least 98%, at least 99%, at least 99.5%, or 100% identical to SEQ ID NO: 530. In another example, the anti-TfR scFv coding sequence is (or comprises a sequence) at least 90%, at least 91%, at least 92%, at least 93%, at least 94%, at least 95%, at least 96%, at least 97%, at least 98%, at least 99%, at least 99.5%, or 100% identical to SEQ ID NO: 530 and encodes an anti-TfR scFv protein (or an anti-TfR scFv protein comprising a sequence) at least 99%, at least 99.5%, or 100% identical to SEQ ID NO: 508. In another example, the anti-TfR scFv coding sequence is (or comprises a sequence) at least 90%, at least 91%, at least 92%, at least 93%, at least 94%, at least 95%, at least 96%, at least 97%, at least 98%, at least 99%, at least 99.5%, or 100% identical to SEQ ID NO: 530 and encodes an anti-TfR scFv protein comprising the sequence set forth in SEQ ID NO: 508. In another example, the anti-TfR scFv coding sequence is (or comprises a sequence) at least 95%, at least 96%, at least 97%, at least 98%, at least 99%, at least 99.5%, or 100% identical to SEQ ID NO: 530. In another example, the anti-TfR scFv coding sequence is (or comprises a sequence) at least 95%, at least 96%, at least 97%, at least 98%, at least 99%, at least 99.5%, or 100% identical to SEQ ID NO: 530 and encodes an anti-TfR scFv protein (or an anti-TfR scFv protein comprising a sequence) at least 99%, at least 99.5%, or 100% identical to SEQ ID NO: 508. In another example, the anti-TfR scFv coding sequence is (or comprises a sequence) at least 95%, at least 96%, at least 97%, at least 98%, at least 99%, at least 99.5%, or 100% identical to SEQ ID NO: 530 and encodes an anti-TfR scFv protein comprising the sequence set forth in SEQ ID NO: 508. In another example, the anti-TfR scFv coding sequence is (or comprises a sequence) at least 99%, at least 99.5%, or 100% identical to SEQ ID NO: 530. In another example, the anti-TfR scFv coding sequence is (or comprises a sequence) at least 99%, at least 99.5%, or 100% identical to SEQ ID NO: 530 and encodes an anti-TfR scFv protein (or an anti-TfR scFv protein comprising a sequence) at least 99%, at least 99.5%, or 100% identical to SEQ ID NO: 508. In another example, the anti-TfR scFv coding sequence is (or comprises a sequence) at least 99%, at least 99.5%, or 100% identical to SEQ ID NO: 530 and encodes an anti-TfR scFv protein comprising the sequence set forth in SEQ ID NO: 508. In another example, the anti-TfR scFv coding sequence comprises the sequence set forth in SEQ ID NO: 530. In another example, the anti-TfR scFv coding sequence consists essentially of the sequence set forth in SEQ ID NO: 530. In another example, the anti-TfR scFv coding sequence consists of the sequence set forth in SEQ ID NO: 530. The anti-TfR coding sequence can be, for example, CpG-depleted (e.g., fully CpG-depleted) and/or codon optimized. For example, the anti-TfR scFv coding sequence can be CpG depleted (e.g., fully CpG-depleted) and codon optimized. Optionally, the anti-TfR scFv coding sequence encodes an anti-TfR scFv protein (or an anti-TfR scFv protein comprising a sequence) at least 90%, at least 91%, at least 92%, at least 93%, at least 94%, at least 95%, at least 96%, at least 97%, at least 98%, at least 99%, at least 99.5%, or 100% identical to SEQ ID NO: 508 (and, e.g., retaining TfR-binding activity). Optionally, the anti-TfR scFv coding sequence encodes an anti-TfR scFv protein (or an anti-TfR scFv protein comprising a sequence) at least 95%, at least 96%, at least 97%, at least 98%, at least 99%, at least 99.5%, or 100% identical to SEQ ID NO: 508 (and, e.g., retaining TfR-binding activity). Optionally, the anti-TfR scFv coding sequence in the above examples encodes an anti-TfR scFv protein (or an anti-TfR scFv protein comprising a sequence) at least 99%, at least 99.5%, or 100% identical to SEQ ID NO: 508 (and, e.g., retaining TfR-binding activity). Optionally, the anti-TfR scFv coding sequence in the above examples encodes an anti-TfR scFv protein comprising the sequence set forth in SEQ ID NO: 508. Optionally, the anti-TfR scFv coding sequence in the above examples encodes an anti-TfR scFv protein consisting essentially of the sequence set forth in SEQ ID NO: 508. Optionally, the anti-TfR scFv coding sequence in the above examples encodes an anti-TfR scFv protein consisting of the sequence set forth in SEQ ID NO: 508.

[0347] In one example, the anti-TfR scFv coding sequence is (or comprises a sequence) at least 90%, at least 91%, at least 92%, at least 93%, at least 94%, at least 95%, at least 96%, at least 97%, at least 98%, at least 99%, at least 99.5%, or 100% identical to SEQ ID NO: 531. In another example, the anti-TfR scFv coding sequence is (or comprises a sequence) at least 90%, at least 91%, at least 92%, at least 93%, at least 94%, at least 95%, at least 96%, at least 97%, at least 98%, at least 99%, at least 99.5%, or 100% identical to SEQ ID NO: 531 and encodes an anti-TfR scFv protein (or an anti-TfR scFv protein comprising a sequence) at least 99%, at least 99.5%, or 100% identical to SEQ ID NO: 508. In another example, the anti-TfR scFv coding sequence is (or comprises a sequence) at least 90%, at least 91%, at least 92%, at least 93%, at least 94%, at least 95%, at least 96%, at least 97%, at least 98%, at least 99%, at least 99.5%, or 100% identical to SEQ ID NO: 531 and encodes an anti-TfR scFv protein comprising the sequence set forth in SEQ ID NO: 508. In another example, the anti-TfR scFv coding sequence is (or comprises a sequence) at least 95%, at least 96%, at least 97%, at least 98%, at least 99%, at least 99.5%, or 100% identical to SEQ ID NO: 531. In another example, the anti-TfR scFv coding sequence is (or comprises a sequence) at least 95%, at least 96%, at least 97%, at least 98%, at least 99%, at least 99.5%, or 100% identical to SEQ ID NO: 531 and encodes an anti-TfR scFv protein (or an anti-TfR scFv protein comprising a sequence) at least 99%, at least 99.5%, or 100% identical to SEQ ID NO: 508. In another example, the anti-TfR scFv coding sequence is (or comprises a sequence) at least 95%, at least 96%, at least 97%, at least 98%, at least 99%, at least 99.5%, or 100% identical to SEQ ID NO: 531 and encodes an anti-TfR scFv protein comprising the sequence set forth in SEQ ID NO: 508. In another example, the anti-TfR scFv coding sequence is (or comprises a sequence) at least 99%, at least 99.5%, or 100% identical to SEQ ID NO: 531. In another example, the anti-TfR scFv coding sequence is (or comprises a sequence) at least 99%, at least 99.5%, or 100% identical to SEQ ID NO: 531 and encodes an anti-TfR scFv protein (or an anti-TfR scFv protein comprising a sequence) at least 99%, at least 99.5%, or 100% identical to SEQ ID NO: 508. In another example, the anti-TfR scFv coding sequence is (or comprises a sequence) at least 99%, at least 99.5%, or 100% identical to SEQ ID NO: 531 and encodes an anti-TfR scFv protein comprising the sequence set forth in SEQ ID NO: 508. In another example, the anti-TfR scFv coding sequence comprises the sequence set forth in SEQ ID NO: 531. In another example, the anti-TfR scFv coding sequence consists essentially of the sequence set forth in SEQ ID NO: 531. In another example, the anti-TfR scFv coding sequence consists of the sequence set forth in SEQ ID NO: 531. The anti-TfR coding sequence can be, for example, CpG-depleted (e.g., fully CpG-depleted) and/or codon optimized. For example, the anti-TfR scFv coding sequence can be CpG depleted (e.g., fully CpG-depleted) and codon optimized. Optionally, the anti-TfR scFv coding sequence encodes an anti-TfR scFv protein (or an anti-TfR scFv protein comprising a sequence) at least 90%, at least 91%, at least 92%, at least 93%, at least 94%, at least 95%, at least 96%, at least 97%, at least 98%, at least 99%, at least 99.5%, or 100% identical to SEQ ID NO: 508 (and, e.g., retaining TfR-binding activity). Optionally, the anti-TfR scFv coding sequence encodes an anti-TfR scFv protein (or an anti-TfR scFv protein comprising a sequence) at least 95%, at least 96%, at least 97%, at least 98%, at least 99%, at least 99.5%, or 100% identical to SEQ ID NO: 508 (and, e.g., retaining TfR-binding activity). Optionally, the anti-TfR scFv coding sequence in the above examples encodes an anti-TfR scFv protein (or an anti-TfR scFv protein comprising a sequence) at least 99%, at least 99.5%, or 100% identical to SEQ ID NO: 508 (and, e.g., retaining TfR-binding activity). Optionally, the anti-TfR scFv coding sequence in the above examples encodes an anti-TfR scFv protein comprising the sequence set forth in SEQ ID NO: 508. Optionally, the anti-TfR scFv coding sequence in the above examples encodes an anti-TfR scFv protein consisting essentially of the sequence set forth in SEQ ID NO: 508. Optionally, the anti-TfR scFv coding sequence in the above examples encodes an anti-TfR scFv protein consisting of the sequence set forth in SEQ ID NO: 508.

[0348] In one example, the anti-TfR scFv coding sequence is (or comprises a sequence) at least 90%, at least 91%, at least 92%, at least 93%, at least 94%, at least 95%, at least 96%, at least 97%, at least 98%, at least 99%, at least 99.5%, or 100% identical to SEQ ID NO: 532. In another example, the anti-TfR scFv coding sequence is (or comprises a sequence) at least 90%, at least 91%, at least 92%, at least 93%, at least 94%, at least 95%, at least 96%, at least 97%, at least 98%, at least 99%, at least 99.5%, or 100% identical to SEQ ID NO: 532 and encodes an anti-TfR scFv protein (or an anti-TfR scFv protein comprising a sequence) at least 99%, at least 99.5%, or 100% identical to SEQ ID NO: 508. In another example, the anti-TfR scFv coding sequence is (or comprises a sequence) at least 90%, at least 91%, at least 92%, at least 93%, at least 94%, at least 95%, at least 96%, at least 97%, at least 98%, at least 99%, at least 99.5%, or 100% identical to SEQ ID NO: 532 and encodes an anti-TfR scFv protein comprising the sequence set forth in SEQ ID NO: 508. In another example, the anti-TfR scFv coding sequence is (or comprises a sequence) at least 95%, at least 96%, at least 97%, at least 98%, at least 99%, at least 99.5%, or 100% identical to SEQ ID NO: 532. In another example, the anti-TfR scFv coding sequence is (or comprises a sequence) at least 95%, at least 96%, at least 97%, at least 98%, at least 99%, at least 99.5%, or 100% identical to SEQ ID NO: 532 and encodes an anti-TfR scFv protein (or an anti-TfR scFv protein comprising a sequence) at least 99%, at least 99.5%, or 100% identical to SEQ ID NO: 508. In another example, the anti-TfR scFv coding sequence is (or comprises a sequence) at least 95%, at least 96%, at least 97%, at least 98%, at least 99%, at least 99.5%, or 100% identical to SEQ ID NO: 532 and encodes an anti-TfR scFv protein comprising the sequence set forth in SEQ ID NO: 508. In another example, the anti-TfR scFv coding sequence is (or comprises a sequence) at least 99%, at least 99.5%, or 100% identical to SEQ ID NO: 532. In another example, the anti-TfR scFv coding sequence is (or comprises a sequence) at least 99%, at least 99.5%, or 100% identical to SEQ ID NO: 532 and encodes an anti-TfR scFv protein (or an anti-TfR scFv protein comprising a sequence) at least 99%, at least 99.5%, or 100% identical to SEQ ID NO: 508. In another example, the anti-TfR scFv coding sequence is (or comprises a sequence) at least 99%, at least 99.5%, or 100% identical to SEQ ID NO: 532 and encodes an anti-TfR scFv protein comprising the sequence set forth in SEQ ID NO: 508. In another example, the anti-TfR scFv coding sequence comprises the sequence set forth in SEQ ID NO: 532. In another example, the anti-TfR scFv coding sequence consists essentially of the sequence set forth in SEQ ID NO: 532. In another example, the anti-TfR scFv coding sequence consists of the sequence set forth in SEQ ID NO: 532. The anti-TfR coding sequence can be, for example, CpG-depleted (e.g., fully CpG-depleted) and/or codon optimized. For example, the anti-TfR scFv coding sequence can be CpG depleted (e.g., fully CpG-depleted) and codon optimized. Optionally, the anti-TfR scFv coding sequence encodes an anti-TfR scFv protein (or an anti-TfR scFv protein comprising a sequence) at least 90%, at least 91%, at least 92%, at least 93%, at least 94%, at least 95%, at least 96%, at least 97%, at least 98%, at least 99%, at least 99.5%, or 100% identical to SEQ ID NO: 508 (and, e.g., retaining TfR-binding activity). Optionally, the anti-TfR scFv coding sequence encodes an anti-TfR scFv protein (or an anti-TfR scFv protein comprising a sequence) at least 95%, at least 96%, at least 97%, at least 98%, at least 99%, at least 99.5%, or 100% identical to SEQ ID NO: 508 (and, e.g., retaining TfR-binding activity). Optionally, the anti-TfR scFv coding sequence in the above examples encodes an anti-TfR scFv protein (or an anti-TfR scFv protein comprising a sequence) at least 99%, at least 99.5%, or 100% identical to SEQ ID NO: 508 (and, e.g., retaining TfR-binding activity). Optionally, the anti-TfR scFv coding sequence in the above examples encodes an anti-TfR scFv protein comprising the sequence set forth in SEQ ID NO: 508. Optionally, the anti-TfR scFv coding sequence in the above examples encodes an anti-TfR scFv protein consisting essentially of the sequence set forth in SEQ ID NO: 508. Optionally, the anti-TfR scFv coding sequence in the above examples encodes an anti-TfR scFv protein consisting of the sequence set forth in SEQ ID NO: 508.

[0349] Various codon optimized anti-TfR scFv coding sequences are provided. The anti-TfR scFv coding sequence can be, for example, CpG-depleted (e.g., fully CpG depleted) and/or codon optimized (e.g., CpG depleted (e.g., fully CpG-depleted) and codon optimized). In one example, the anti-TfR scFv coding sequence is (or comprises a sequence) at least 90%, at least 91%, at least 92%, at least 93%, at least 94%, at least 95%, at least 96%, at least 97%, at least 98%, at least 99%, at least 99.5%, or 100% identical to any one of SEQ ID NOS: 527-529. In another example, the anti-TfR scFv coding sequence is (or comprises a sequence) at least 95%, at least 96%, at least 97%, at least 98%, at least 99%, at least 99.5%, or 100% identical to any one of SEQ ID NOS: 527-529. In another example, the anti-TfR scFv coding sequence is (or comprises a sequence) at least 99%, at least 99.5%, or 100% identical to any one of SEQ ID NOS: 527-529. In another example, the anti-TfR scFv coding sequence comprises the sequence set forth in any one of SEQ ID NOS: 527-529. In another example, the anti-TfR scFv coding sequence consists essentially of the sequence set forth in any one of SEQ ID NOS: 527-529. In another example, the anti-TfR scFv coding sequence consists of the sequence set forth in any one of SEQ ID NOS: 527-529. Optionally, the anti-TfR scFv coding sequence encodes an anti-TfR scFv protein (or an anti-TfR scFv protein comprising a sequence) at least 90%, at least 91%, at least 92%, at least 93%, at least 94%, at least 95%, at least 96%, at least 97%, at least 98%, at least 99%, at least 99.5%, or 100% identical to SEQ ID NO: 505 (and, e.g., retaining TfR-binding activity). Optionally, the anti-TfR scFv coding sequence encodes an anti-TfR scFv protein (or an anti-TfR scFv protein comprising a sequence) at least 95%, at least 96%, at least 97%, at least 98%, at least 99%, at least 99.5%, or 100% identical to SEQ ID NO: 505 (and, e.g., retaining TfR-binding activity). Optionally, the anti-TfR scFv coding sequence in the above examples encodes an anti-TfR scFv protein (or an anti-TfR scFv protein comprising a sequence) at least 99%, at least 99.5%, or 100% identical to SEQ ID NO: 505 (and, e.g., retaining TfR-binding activity). Optionally, the anti-TfR scFv coding sequence in the above examples encodes an anti-TfR scFv protein comprising the sequence set forth in SEQ ID NO: 505. Optionally, the anti-TfR scFv coding sequence in the above examples encodes an anti-TfR scFv protein consisting essentially of the sequence set forth in SEQ ID NO: 505. Optionally, the anti-TfR scFv coding sequence in the above examples encodes an anti-TfR scFv protein consisting of the sequence set forth in SEQ ID NO: 505.

[0350] In one example, the anti-TfR scFv coding sequence is (or comprises a sequence) at least 90%, at least 91%, at least 92%, at least 93%, at least 94%, at least 95%, at least 96%, at least 97%, at least 98%, at least 99%, at least 99.5%, or 100% identical to SEQ ID NO: 527. In another example, the anti-TfR scFv coding sequence is (or comprises a sequence) at least 90%, at least 91%, at least 92%, at least 93%, at least 94%, at least 95%, at least 96%, at least 97%, at least 98%, at least 99%, at least 99.5%, or 100% identical to SEQ ID NO: 527 and encodes an anti-TfR scFv protein (or an anti-TfR scFv protein comprising a sequence) at least 99%, at least 99.5%, or 100% identical to SEQ ID NO: 505. In another example, the anti-TfR scFv coding sequence is (or comprises a sequence) at least 90%, at least 91%, at least 92%, at least 93%, at least 94%, at least 95%, at least 96%, at least 97%, at least 98%, at least 99%, at least 99.5%, or 100% identical to SEQ ID NO: 527 and encodes an anti-TfR scFv protein comprising the sequence set forth in SEQ ID NO: 505. In another example, the anti-TfR scFv coding sequence is (or comprises a sequence) at least 95%, at least 96%, at least 97%, at least 98%, at least 99%, at least 99.5%, or 100% identical to SEQ ID NO: 527. In another example, the anti-TfR scFv coding sequence is (or comprises a sequence) at least 95%, at least 96%, at least 97%, at least 98%, at least 99%, at least 99.5%, or 100% identical to SEQ ID NO: 527 and encodes an anti-TfR scFv protein (or an anti-TfR scFv protein comprising a sequence) at least 99%, at least 99.5%, or 100% identical to SEQ ID NO: 505. In another example, the anti-TfR scFv coding sequence is (or comprises a sequence) at least 95%, at least 96%, at least 97%, at least 98%, at least 99%, at least 99.5%, or 100% identical to SEQ ID NO: 527 and encodes an anti-TfR scFv protein comprising the sequence set forth in SEQ ID NO: 505. In another example, the anti-TfR scFv coding sequence is (or comprises a sequence) at least 99%, at least 99.5%, or 100% identical to SEQ ID NO: 527. In another example, the anti-TfR scFv coding sequence is (or comprises a sequence) at least 99%, at least 99.5%, or 100% identical to SEQ ID NO: 527 and encodes an anti-TfR scFv protein (or an anti-TfR scFv protein comprising a sequence) at least 99%, at least 99.5%, or 100% identical to SEQ ID NO: 505. In another example, the anti-TfR scFv coding sequence is (or comprises a sequence) at least 99%, at least 99.5%, or 100% identical to SEQ ID NO: 527 and encodes an anti-TfR scFv protein comprising the sequence set forth in SEQ ID NO: 505. In another example, the anti-TfR scFv coding sequence comprises the sequence set forth in SEQ ID NO: 527. In another example, the anti-TfR scFv coding sequence consists essentially of the sequence set forth in SEQ ID NO: 527. In another example, the anti-TfR scFv coding sequence consists of the sequence set forth in SEQ ID NO: 527. The anti-TfR coding sequence can be, for example, CpG-depleted (e.g., fully CpG-depleted) and/or codon optimized. For example, the anti-TfR scFv coding sequence can be CpG depleted (e.g., fully CpG-depleted) and codon optimized. Optionally, the anti-TfR scFv coding sequence encodes an anti-TfR scFv protein (or an anti-TfR scFv protein comprising a sequence) at least 90%, at least 91%, at least 92%, at least 93%, at least 94%, at least 95%, at least 96%, at least 97%, at least 98%, at least 99%, at least 99.5%, or 100% identical to SEQ ID NO: 505 (and, e.g., retaining TfR-binding activity). Optionally, the anti-TfR scFv coding sequence encodes an anti-TfR scFv protein (or an anti-TfR scFv protein comprising a sequence) at least 95%, at least 96%, at least 97%, at least 98%, at least 99%, at least 99.5%, or 100% identical to SEQ ID NO: 505 (and, e.g., retaining TfR-binding activity). Optionally, the anti-TfR scFv coding sequence in the above examples encodes an anti-TfR scFv protein (or an anti-TfR scFv protein comprising a sequence) at least 99%, at least 99.5%, or 100% identical to SEQ ID NO: 505 (and, e.g., retaining TfR-binding activity). Optionally, the anti-TfR scFv coding sequence in the above examples encodes an anti-TfR scFv protein comprising the sequence set forth in SEQ ID NO: 505. Optionally, the anti-TfR scFv coding sequence in the above examples encodes an anti-TfR scFv protein consisting essentially of the sequence set forth in SEQ ID NO: 505. Optionally, the anti-TfR scFv coding sequence in the above examples encodes an anti-TfR scFv protein consisting of the sequence set forth in SEQ ID NO: 505.

[0351] In one example, the anti-TfR scFv coding sequence is (or comprises a sequence) at least 90%, at least 91%, at least 92%, at least 93%, at least 94%, at least 95%, at least 96%, at least 97%, at least 98%, at least 99%, at least 99.5%, or 100% identical to SEQ ID NO: 528. In another example, the anti-TfR scFv coding sequence is (or comprises a sequence) at least 90%, at least 91%, at least 92%, at least 93%, at least 94%, at least 95%, at least 96%, at least 97%, at least 98%, at least 99%, at least 99.5%, or 100% identical to SEQ ID NO: 528 and encodes an anti-TfR scFv protein (or an anti-TfR scFv protein comprising a sequence) at least 99%, at least 99.5%, or 100% identical to SEQ ID NO: 505. In another example, the anti-TfR scFv coding sequence is (or comprises a sequence) at least 90%, at least 91%, at least 92%, at least 93%, at least 94%, at least 95%, at least 96%, at least 97%, at least 98%, at least 99%, at least 99.5%, or 100% identical to SEQ ID NO: 528 and encodes an anti-TfR scFv protein comprising the sequence set forth in SEQ ID NO: 505. In another example, the anti-TfR scFv coding sequence is (or comprises a sequence) at least 95%, at least 96%, at least 97%, at least 98%, at least 99%, at least 99.5%, or 100% identical to SEQ ID NO: 528. In another example, the anti-TfR scFv coding sequence is (or comprises a sequence) at least 95%, at least 96%, at least 97%, at least 98%, at least 99%, at least 99.5%, or 100% identical to SEQ ID NO: 528 and encodes an anti-TfR scFv protein (or an anti-TfR scFv protein comprising a sequence) at least 99%, at least 99.5%, or 100% identical to SEQ ID NO: 505. In another example, the anti-TfR scFv coding sequence is (or comprises a sequence) at least 95%, at least 96%, at least 97%, at least 98%, at least 99%, at least 99.5%, or 100% identical to SEQ ID NO: 528 and encodes an anti-TfR scFv protein comprising the sequence set forth in SEQ ID NO: 505. In another example, the anti-TfR scFv coding sequence is (or comprises a sequence) at least 99%, at least 99.5%, or 100% identical to SEQ ID NO: 528. In another example, the anti-TfR scFv coding sequence is (or comprises a sequence) at least 99%, at least 99.5%, or 100% identical to SEQ ID NO: 528 and encodes an anti-TfR scFv protein (or an anti-TfR scFv protein comprising a sequence) at least 99%, at least 99.5%, or 100% identical to SEQ ID NO: 505. In another example, the anti-TfR scFv coding sequence is (or comprises a sequence) at least 99%, at least 99.5%, or 100% identical to SEQ ID NO: 528 and encodes an anti-TfR scFv protein comprising the sequence set forth in SEQ ID NO: 505. In another example, the anti-TfR scFv coding sequence comprises the sequence set forth in SEQ ID NO: 528. In another example, the anti-TfR scFv coding sequence consists essentially of the sequence set forth in SEQ ID NO: 528. In another example, the anti-TfR scFv coding sequence consists of the sequence set forth in SEQ ID NO: 528. The anti-TfR coding sequence can be, for example, CpG-depleted (e.g., fully CpG-depleted) and/or codon optimized. For example, the anti-TfR scFv coding sequence can be CpG depleted (e.g., fully CpG-depleted) and codon optimized. Optionally, the anti-TfR scFv coding sequence encodes an anti-TfR scFv protein (or an anti-TfR scFv protein comprising a sequence) at least 90%, at least 91%, at least 92%, at least 93%, at least 94%, at least 95%, at least 96%, at least 97%, at least 98%, at least 99%, at least 99.5%, or 100% identical to SEQ ID NO: 505 (and, e.g., retaining TfR-binding activity). Optionally, the anti-TfR scFv coding sequence encodes an anti-TfR scFv protein (or an anti-TfR scFv protein comprising a sequence) at least 95%, at least 96%, at least 97%, at least 98%, at least 99%, at least 99.5%, or 100% identical to SEQ ID NO: 505 (and, e.g., retaining TfR-binding activity). Optionally, the anti-TfR scFv coding sequence in the above examples encodes an anti-TfR scFv protein (or an anti-TfR scFv protein comprising a sequence) at least 99%, at least 99.5%, or 100% identical to SEQ ID NO: 505 (and, e.g., retaining TfR-binding activity). Optionally, the anti-TfR scFv coding sequence in the above examples encodes an anti-TfR scFv protein comprising the sequence set forth in SEQ ID NO: 505. Optionally, the anti-TfR scFv coding sequence in the above examples encodes an anti-TfR scFv protein consisting essentially of the sequence set forth in SEQ ID NO: 505. Optionally, the anti-TfR scFv coding sequence in the above examples encodes an anti-TfR scFv protein consisting of the sequence set forth in SEQ ID NO: 505.

[0352] In one example, the anti-TfR scFv coding sequence is (or comprises a sequence) at least 90%, at least 91%, at least 92%, at least 93%, at least 94%, at least 95%, at least 96%, at least 97%, at least 98%, at least 99%, at least 99.5%, or 100% identical to SEQ ID NO: 529. In another example, the anti-TfR scFv coding sequence is (or comprises a sequence) at least 90%, at least 91%, at least 92%, at least 93%, at least 94%, at least 95%, at least 96%, at least 97%, at least 98%, at least 99%, at least 99.5%, or 100% identical to SEQ ID NO: 529 and encodes an anti-TfR scFv protein (or an anti-TfR scFv protein comprising a sequence) at least 99%, at least 99.5%, or 100% identical to SEQ ID NO: 505. In another example, the anti-TfR scFv coding sequence is (or comprises a sequence) at least 90%, at least 91%, at least 92%, at least 93%, at least 94%, at least 95%, at least 96%, at least 97%, at least 98%, at least 99%, at least 99.5%, or 100% identical to SEQ ID NO: 529 and encodes an anti-TfR scFv protein comprising the sequence set forth in SEQ ID NO: 505. In another example, the anti-TfR scFv coding sequence is (or comprises a sequence) at least 95%, at least 96%, at least 97%, at least 98%, at least 99%, at least 99.5%, or 100% identical to SEQ ID NO: 529. In another example, the anti-TfR scFv coding sequence is (or comprises a sequence) at least 95%, at least 96%, at least 97%, at least 98%, at least 99%, at least 99.5%, or 100% identical to SEQ ID NO: 529 and encodes an anti-TfR scFv protein (or an anti-TfR scFv protein comprising a sequence) at least 99%, at least 99.5%, or 100% identical to SEQ ID NO: 505. In another example, the anti-TfR scFv coding sequence is (or comprises a sequence) at least 95%, at least 96%, at least 97%, at least 98%, at least 99%, at least 99.5%, or 100% identical to SEQ ID NO: 529 and encodes an anti-TfR scFv protein comprising the sequence set forth in SEQ ID NO: 505. In another example, the anti-TfR scFv coding sequence is (or comprises a sequence) at least 99%, at least 99.5%, or 100% identical to SEQ ID NO: 529. In another example, the anti-TfR scFv coding sequence is (or comprises a sequence) at least 99%, at least 99.5%, or 100% identical to SEQ ID NO: 529 and encodes an anti-TfR scFv protein (or an anti-TfR scFv protein comprising a sequence) at least 99%, at least 99.5%, or 100% identical to SEQ ID NO: 505. In another example, the anti-TfR scFv coding sequence is (or comprises a sequence) at least 99%, at least 99.5%, or 100% identical to SEQ ID NO: 529 and encodes an anti-TfR scFv protein comprising the sequence set forth in SEQ ID NO: 505. In another example, the anti-TfR scFv coding sequence comprises the sequence set forth in SEQ ID NO: 529. In another example, the anti-TfR scFv coding sequence consists essentially of the sequence set forth in SEQ ID NO: 529. In another example, the anti-TfR scFv coding sequence consists of the sequence set forth in SEQ ID NO: 529. The anti-TfR coding sequence can be, for example, CpG-depleted (e.g., fully CpG-depleted) and/or codon optimized. For example, the anti-TfR scFv coding sequence can be CpG depleted (e.g., fully CpG-depleted) and codon optimized. Optionally, the anti-TfR scFv coding sequence encodes an anti-TfR scFv protein (or an anti-TfR scFv protein comprising a sequence) at least 90%, at least 91%, at least 92%, at least 93%, at least 94%, at least 95%, at least 96%, at least 97%, at least 98%, at least 99%, at least 99.5%, or 100% identical to SEQ ID NO: 505 (and, e.g., retaining TfR-binding activity). Optionally, the anti-TfR scFv coding sequence encodes an anti-TfR scFv protein (or an anti-TfR scFv protein comprising a sequence) at least 95%, at least 96%, at least 97%, at least 98%, at least 99%, at least 99.5%, or 100% identical to SEQ ID NO: 505 (and, e.g., retaining TfR-binding activity). Optionally, the anti-TfR scFv coding sequence in the above examples encodes an anti-TfR scFv protein (or an anti-TfR scFv protein comprising a sequence) at least 99%, at least 99.5%, or 100% identical to SEQ ID NO: 505 (and, e.g., retaining TfR-binding activity). Optionally, the anti-TfR scFv coding sequence in the above examples encodes an anti-TfR scFv protein comprising the sequence set forth in SEQ ID NO: 505. Optionally, the anti-TfR scFv coding sequence in the above examples encodes an anti-TfR scFv protein consisting essentially of the sequence set forth in SEQ ID NO: 505. Optionally, the anti-TfR scFv coding sequence in the above examples encodes an anti-TfR scFv protein consisting of the sequence set forth in SEQ ID NO: 505.

[0353] Various codon optimized anti-TfR scFv coding sequences are provided. The anti-TfR scFv coding sequence can be, for example, CpG-depleted (e.g., fully CpG depleted) and/or codon optimized (e.g., CpG depleted (e.g., fully CpG-depleted) and codon optimized). In one example, the anti-TfR scFv coding sequence is (or comprises a sequence) at least 90%, at least 91%, at least 92%, at least 93%, at least 94%, at least 95%, at least 96%, at least 97%, at least 98%, at least 99%, at least 99.5%, or 100% identical to any one of SEQ ID NOS: 524-526. In another example, the anti-TfR scFv coding sequence is (or comprises a sequence) at least 95%, at least 96%, at least 97%, at least 98%, at least 99%, at least 99.5%, or 100% identical to any one of SEQ ID NOS: 524-526. In another example, the anti-TfR scFv coding sequence is (or comprises a sequence) at least 99%, at least 99.5%, or 100% identical to any one of SEQ ID NOS: 524-526. In another example, the anti-TfR scFv coding sequence comprises the sequence set forth in any one of SEQ ID NOS: 524-526. In another example, the anti-TfR scFv coding sequence consists essentially of the sequence set forth in any one of SEQ ID NOS: 524-526. In another example, the anti-TfR scFv coding sequence consists of the sequence set forth in any one of SEQ ID NOS: 524-526. Optionally, the anti-TfR scFv coding sequence encodes an anti-TfR scFv protein (or an anti-TfR scFv protein comprising a sequence) at least 90%, at least 91%, at least 92%, at least 93%, at least 94%, at least 95%, at least 96%, at least 97%, at least 98%, at least 99%, at least 99.5%, or 100% identical to SEQ ID NO: 494 (and, e.g., retaining TfR-binding activity). Optionally, the anti-TfR scFv coding sequence encodes an anti-TfR scFv protein (or an anti-TfR scFv protein comprising a sequence) at least 95%, at least 96%, at least 97%, at least 98%, at least 99%, at least 99.5%, or 100% identical to SEQ ID NO: 494 (and, e.g., retaining TfR-binding activity). Optionally, the anti-TfR scFv coding sequence in the above examples encodes an anti-TfR scFv protein (or an anti-TfR scFv protein comprising a sequence) at least 99%, at least 99.5%, or 100% identical to SEQ ID NO: 494 (and, e.g., retaining TfR-binding activity). Optionally, the anti-TfR scFv coding sequence in the above examples encodes an anti-TfR scFv protein comprising the sequence set forth in SEQ ID NO: 494. Optionally, the anti-TfR scFv coding sequence in the above examples encodes an anti-TfR scFv protein consisting essentially of the sequence set forth in SEQ ID NO: 494. Optionally, the anti-TfR scFv coding sequence in the above examples encodes an anti-TfR scFv protein consisting of the sequence set forth in SEQ ID NO: 494.

[0354] In one example, the anti-TfR scFv coding sequence is (or comprises a sequence) at least 90%, at least 91%, at least 92%, at least 93%, at least 94%, at least 95%, at least 96%, at least 97%, at least 98%, at least 99%, at least 99.5%, or 100% identical to SEQ ID NO: 524. In another example, the anti-TfR scFv coding sequence is (or comprises a sequence) at least 90%, at least 91%, at least 92%, at least 93%, at least 94%, at least 95%, at least 96%, at least 97%, at least 98%, at least 99%, at least 99.5%, or 100% identical to SEQ ID NO: 524 and encodes an anti-TfR scFv protein (or an anti-TfR scFv protein comprising a sequence) at least 99%, at least 99.5%, or 100% identical to SEQ ID NO: 494. In another example, the anti-TfR scFv coding sequence is (or comprises a sequence) at least 90%, at least 91%, at least 92%, at least 93%, at least 94%, at least 95%, at least 96%, at least 97%, at least 98%, at least 99%, at least 99.5%, or 100% identical to SEQ ID NO: 524 and encodes an anti-TfR scFv protein comprising the sequence set forth in SEQ ID NO: 494. In another example, the anti-TfR scFv coding sequence is (or comprises a sequence) at least 95%, at least 96%, at least 97%, at least 98%, at least 99%, at least 99.5%, or 100% identical to SEQ ID NO: 524. In another example, the anti-TfR scFv coding sequence is (or comprises a sequence) at least 95%, at least 96%, at least 97%, at least 98%, at least 99%, at least 99.5%, or 100% identical to SEQ ID NO: 524 and encodes an anti-TfR scFv protein (or an anti-TfR scFv protein comprising a sequence) at least 99%, at least 99.5%, or 100% identical to SEQ ID NO: 494. In another example, the anti-TfR scFv coding sequence is (or comprises a sequence) at least 95%, at least 96%, at least 97%, at least 98%, at least 99%, at least 99.5%, or 100% identical to SEQ ID NO: 524 and encodes an anti-TfR scFv protein comprising the sequence set forth in SEQ ID NO: 494. In another example, the anti-TfR scFv coding sequence is (or comprises a sequence) at least 99%, at least 99.5%, or 100% identical to SEQ ID NO: 524. In another example, the anti-TfR scFv coding sequence is (or comprises a sequence) at least 99%, at least 99.5%, or 100% identical to SEQ ID NO: 524 and encodes an anti-TfR scFv protein (or an anti-TfR scFv protein comprising a sequence) at least 99%, at least 99.5%, or 100% identical to SEQ ID NO: 494. In another example, the anti-TfR scFv coding sequence is (or comprises a sequence) at least 99%, at least 99.5%, or 100% identical to SEQ ID NO: 524 and encodes an anti-TfR scFv protein comprising the sequence set forth in SEQ ID NO: 494. In another example, the anti-TfR scFv coding sequence comprises the sequence set forth in SEQ ID NO: 524. In another example, the anti-TfR scFv coding sequence consists essentially of the sequence set forth in SEQ ID NO: 524. In another example, the anti-TfR scFv coding sequence consists of the sequence set forth in SEQ ID NO: 524. The anti-TfR coding sequence can be, for example, CpG-depleted (e.g., fully CpG-depleted) and/or codon optimized. For example, the anti-TfR scFv coding sequence can be CpG depleted (e.g., fully CpG-depleted) and codon optimized. Optionally, the anti-TfR scFv coding sequence encodes an anti-TfR scFv protein (or an anti-TfR scFv protein comprising a sequence) at least 90%, at least 91%, at least 92%, at least 93%, at least 94%, at least 95%, at least 96%, at least 97%, at least 98%, at least 99%, at least 99.5%, or 100% identical to SEQ ID NO: 494 (and, e.g., retaining TfR-binding activity). Optionally, the anti-TfR scFv coding sequence encodes an anti-TfR scFv protein (or an anti-TfR scFv protein comprising a sequence) at least 95%, at least 96%, at least 97%, at least 98%, at least 99%, at least 99.5%, or 100% identical to SEQ ID NO: 494 (and, e.g., retaining TfR-binding activity). Optionally, the anti-TfR scFv coding sequence in the above examples encodes an anti-TfR scFv protein (or an anti-TfR scFv protein comprising a sequence) at least 99%, at least 99.5%, or 100% identical to SEQ ID NO: 494 (and, e.g., retaining TfR-binding activity). Optionally, the anti-TfR scFv coding sequence in the above examples encodes an anti-TfR scFv protein comprising the sequence set forth in SEQ ID NO: 494. Optionally, the anti-TfR scFv coding sequence in the above examples encodes an anti-TfR scFv protein consisting essentially of the sequence set forth in SEQ ID NO: 494. Optionally, the anti-TfR scFv coding sequence in the above examples encodes an anti-TfR scFv protein consisting of the sequence set forth in SEQ ID NO: 494.

[0355] In one example, the anti-TfR scFv coding sequence is (or comprises a sequence) at least 90%, at least 91%, at least 92%, at least 93%, at least 94%, at least 95%, at least 96%, at least 97%, at least 98%, at least 99%, at least 99.5%, or 100% identical to SEQ ID NO: 525. In another example, the anti-TfR scFv coding sequence is (or comprises a sequence) at least 90%, at least 91%, at least 92%, at least 93%, at least 94%, at least 95%, at least 96%, at least 97%, at least 98%, at least 99%, at least 99.5%, or 100% identical to SEQ ID NO: 525 and encodes an anti-TfR scFv protein (or an anti-TfR scFv protein comprising a sequence) at least 99%, at least 99.5%, or 100% identical to SEQ ID NO: 494. In another example, the anti-TfR scFv coding sequence is (or comprises a sequence) at least 90%, at least 91%, at least 92%, at least 93%, at least 94%, at least 95%, at least 96%, at least 97%, at least 98%, at least 99%, at least 99.5%, or 100% identical to SEQ ID NO: 525 and encodes an anti-TfR scFv protein comprising the sequence set forth in SEQ ID NO: 494. In another example, the anti-TfR scFv coding sequence is (or comprises a sequence) at least 95%, at least 96%, at least 97%, at least 98%, at least 99%, at least 99.5%, or 100% identical to SEQ ID NO: 525. In another example, the anti-TfR scFv coding sequence is (or comprises a sequence) at least 95%, at least 96%, at least 97%, at least 98%, at least 99%, at least 99.5%, or 100% identical to SEQ ID NO: 525 and encodes an anti-TfR scFv protein (or an anti-TfR scFv protein comprising a sequence) at least 99%, at least 99.5%, or 100% identical to SEQ ID NO: 494. In another example, the anti-TfR scFv coding sequence is (or comprises a sequence) at least 95%, at least 96%, at least 97%, at least 98%, at least 99%, at least 99.5%, or 100% identical to SEQ ID NO: 525 and encodes an anti-TfR scFv protein comprising the sequence set forth in SEQ ID NO: 494. In another example, the anti-TfR scFv coding sequence is (or comprises a sequence) at least 99%, at least 99.5%, or 100% identical to SEQ ID NO: 525. In another example, the anti-TfR scFv coding sequence is (or comprises a sequence) at least 99%, at least 99.5%, or 100% identical to SEQ ID NO: 525 and encodes an anti-TfR scFv protein (or an anti-TfR scFv protein comprising a sequence) at least 99%, at least 99.5%, or 100% identical to SEQ ID NO: 494. In another example, the anti-TfR scFv coding sequence is (or comprises a sequence) at least 99%, at least 99.5%, or 100% identical to SEQ ID NO: 525 and encodes an anti-TfR scFv protein comprising the sequence set forth in SEQ ID NO: 494. In another example, the anti-TfR scFv coding sequence comprises the sequence set forth in SEQ ID NO: 525. In another example, the anti-TfR scFv coding sequence consists essentially of the sequence set forth in SEQ ID NO: 525. In another example, the anti-TfR scFv coding sequence consists of the sequence set forth in SEQ ID NO: 525. The anti-TfR coding sequence can be, for example, CpG-depleted (e.g., fully CpG-depleted) and/or codon optimized. For example, the anti-TfR scFv coding sequence can be CpG depleted (e.g., fully CpG-depleted) and codon optimized. Optionally, the anti-TfR scFv coding sequence encodes an anti-TfR scFv protein (or an anti-TfR scFv protein comprising a sequence) at least 90%, at least 91%, at least 92%, at least 93%, at least 94%, at least 95%, at least 96%, at least 97%, at least 98%, at least 99%, at least 99.5%, or 100% identical to SEQ ID NO: 494 (and, e.g., retaining TfR-binding activity). Optionally, the anti-TfR scFv coding sequence encodes an anti-TfR scFv protein (or an anti-TfR scFv protein comprising a sequence) at least 95%, at least 96%, at least 97%, at least 98%, at least 99%, at least 99.5%, or 100% identical to SEQ ID NO: 494 (and, e.g., retaining TfR-binding activity). Optionally, the anti-TfR scFv coding sequence in the above examples encodes an anti-TfR scFv protein (or an anti-TfR scFv protein comprising a sequence) at least 99%, at least 99.5%, or 100% identical to SEQ ID NO: 494 (and, e.g., retaining TfR-binding activity). Optionally, the anti-TfR scFv coding sequence in the above examples encodes an anti-TfR scFv protein comprising the sequence set forth in SEQ ID NO: 494. Optionally, the anti-TfR scFv coding sequence in the above examples encodes an anti-TfR scFv protein consisting essentially of the sequence set forth in SEQ ID NO: 494. Optionally, the anti-TfR scFv coding sequence in the above examples encodes an anti-TfR scFv protein consisting of the sequence set forth in SEQ ID NO: 494.

[0356] In one example, the anti-TfR scFv coding sequence is (or comprises a sequence) at least 90%, at least 91%, at least 92%, at least 93%, at least 94%, at least 95%, at least 96%, at least 97%, at least 98%, at least 99%, at least 99.5%, or 100% identical to SEQ ID NO: 526. In another example, the anti-TfR scFv coding sequence is (or comprises a sequence) at least 90%, at least 91%, at least 92%, at least 93%, at least 94%, at least 95%, at least 96%, at least 97%, at least 98%, at least 99%, at least 99.5%, or 100% identical to SEQ ID NO: 526 and encodes an anti-TfR scFv protein (or an anti-TfR scFv protein comprising a sequence) at least 99%, at least 99.5%, or 100% identical to SEQ ID NO: 494. In another example, the anti-TfR scFv coding sequence is (or comprises a sequence) at least 90%, at least 91%, at least 92%, at least 93%, at least 94%, at least 95%, at least 96%, at least 97%, at least 98%, at least 99%, at least 99.5%, or 100% identical to SEQ ID NO: 526 and encodes an anti-TfR scFv protein comprising the sequence set forth in SEQ ID NO: 494. In another example, the anti-TfR scFv coding sequence is (or comprises a sequence) at least 95%, at least 96%, at least 97%, at least 98%, at least 99%, at least 99.5%, or 100% identical to SEQ ID NO: 526. In another example, the anti-TfR scFv coding sequence is (or comprises a sequence) at least 95%, at least 96%, at least 97%, at least 98%, at least 99%, at least 99.5%, or 100% identical to SEQ ID NO: 526 and encodes an anti-TfR scFv protein (or an anti-TfR scFv protein comprising a sequence) at least 99%, at least 99.5%, or 100% identical to SEQ ID NO: 494. In another example, the anti-TfR scFv coding sequence is (or comprises a sequence) at least 95%, at least 96%, at least 97%, at least 98%, at least 99%, at least 99.5%, or 100% identical to SEQ ID NO: 526 and encodes an anti-TfR scFv protein comprising the sequence set forth in SEQ ID NO: 494. In another example, the anti-TfR scFv coding sequence is (or comprises a sequence) at least 99%, at least 99.5%, or 100% identical to SEQ ID NO: 526. In another example, the anti-TfR scFv coding sequence is (or comprises a sequence) at least 99%, at least 99.5%, or 100% identical to SEQ ID NO: 526 and encodes an anti-TfR scFv protein (or an anti-TfR scFv protein comprising a sequence) at least 99%, at least 99.5%, or 100% identical to SEQ ID NO: 494. In another example, the anti-TfR scFv coding sequence is (or comprises a sequence) at least 99%, at least 99.5%, or 100% identical to SEQ ID NO: 526 and encodes an anti-TfR scFv protein comprising the sequence set forth in SEQ ID NO: 494. In another example, the anti-TfR scFv coding sequence comprises the sequence set forth in SEQ ID NO: 526. In another example, the anti-TfR scFv coding sequence consists essentially of the sequence set forth in SEQ ID NO: 526. In another example, the anti-TfR scFv coding sequence consists of the sequence set forth in SEQ ID NO: 526. The anti-TfR coding sequence can be, for example, CpG-depleted (e.g., fully CpG-depleted) and/or codon optimized. For example, the anti-TfR scFv coding sequence can be CpG depleted (e.g., fully CpG-depleted) and codon optimized. Optionally, the anti-TfR scFv coding sequence encodes an anti-TfR scFv protein (or an anti-TfR scFv protein comprising a sequence) at least 90%, at least 91%, at least 92%, at least 93%, at least 94%, at least 95%, at least 96%, at least 97%, at least 98%, at least 99%, at least 99.5%, or 100% identical to SEQ ID NO: 494 (and, e.g., retaining TfR-binding activity). Optionally, the anti-TfR scFv coding sequence encodes an anti-TfR scFv protein (or an anti-TfR scFv protein comprising a sequence) at least 95%, at least 96%, at least 97%, at least 98%, at least 99%, at least 99.5%, or 100% identical to SEQ ID NO: 494 (and, e.g., retaining TfR-binding activity). Optionally, the anti-TfR scFv coding sequence in the above examples encodes an anti-TfR scFv protein (or an anti-TfR scFv protein comprising a sequence) at least 99%, at least 99.5%, or 100% identical to SEQ ID NO: 494 (and, e.g., retaining TfR-binding activity). Optionally, the anti-TfR scFv coding sequence in the above examples encodes an anti-TfR scFv protein comprising the sequence set forth in SEQ ID NO: 494. Optionally, the anti-TfR scFv coding sequence in the above examples encodes an anti-TfR scFv protein consisting essentially of the sequence set forth in SEQ ID NO: 494. Optionally, the anti-TfR scFv coding sequence in the above examples encodes an anti-TfR scFv protein consisting of the sequence set forth in SEQ ID NO: 494.

[0357] When specific anti-TfR scFv or anti-TfR Fab or multidomain therapeutic protein nucleic acid constructs sequences are disclosed herein, they are meant to encompass the sequence disclosed or the reverse complement of the sequence. For example, if an anti-TfR scFv or anti-TfR Fab or multidomain therapeutic protein nucleic acid construct disclosed herein consists of the hypothetical sequence 5′-CTGGACCGA-3′, it is also meant to encompass the reverse complement of that sequence (5′-TCGGTCCAG-3′). Likewise, when construct elements are disclosed herein in a specific 5′ to 3′ order, they are also meant to encompass the reverse complement of the order of those elements. One reason for this is that, in many embodiments disclosed herein, the anti-TfR scFv or anti-TfR Fab or multidomain therapeutic protein nucleic acid constructs are part of a single-stranded recombinant AAV vector. Single-stranded AAV genomes are packaged as either sense (plus-stranded) or anti-sense (minus-stranded genomes), and single-stranded AAV genomes of + and − polarity are packaged with equal frequency into mature rAAV virions. See, e.g., LING et al. (2015) J. Mol. Genet. Med. 9(3):175, Zhou et al. (2008) Mol. Ther. 16(3):494-499, and Samulski et al. (1987) J. Virol. 61:3096-3101, each of which is herein incorporated by reference in its entirety for all purposes.

### (2) Bidirectional Constructs

[0358] The nucleic acid constructs disclosed herein can be bidirectional constructs. Such bidirectional constructs can allow for enhanced insertion and expression of encoded multidomain therapeutic protein. When used in combination with a nuclease agent (e.g., CRISPR/Cas system, zinc finger nuclease (ZFN) system; transcription activator-like effector nuclease (TALEN) system) as described herein, the bidirectionality of the nucleic acid construct allows the construct to be inserted in either direction (i.e., is not limited to insertion in one direction) within a target genomic locus or a cleavage site or target insertion site, allowing the expression of the multidomain therapeutic protein when inserted in either orientation, thereby enhancing expression efficiency.

[0359] A bidirectional construct as disclosed herein can comprise at least two nucleic acid segments, wherein a first segment comprises a first coding sequence for the multidomain therapeutic protein, and a second segment comprises the reverse complement of a second coding sequence for the multidomain therapeutic protein, or vice versa. However, other bidirectional constructs disclosed herein can comprise at least two nucleic acid segments, wherein the first segment comprises a coding sequence for a multidomain therapeutic protein, and the second segment comprises the reverse complement of a coding sequence for another protein, or vice versa. A reverse complement refers to a sequence that is a complement sequence of a reference sequence, wherein the complement sequence is written in the reverse orientation. For example, for a hypothetical sequence 5′-CTGGACCGA-3′, the perfect complement sequence is 3′-GACCTGGCT-5′, and the perfect reverse complement is written 5′-TCGGTCCAG-3′. A reverse complement sequence need not be perfect and may still encode the same polypeptide or a similar polypeptide as the reference sequence. Due to codon usage redundancy, a reverse complement can diverge from a reference sequence that encodes the same polypeptide. The coding sequences can optionally comprise one or more additional sequences, such as sequences encoding amino- or carboxy-terminal amino acid sequences such as a signal sequence, label sequence (e.g., HiBit), or heterologous functional sequence (e.g., nuclear localization sequence (NLS) or self-cleaving peptide) linked to the multidomain therapeutic protein or other protein.

[0360] When specific bidirectional construct sequences are disclosed herein, they are meant to encompass the sequence disclosed or the reverse complement of the sequence. For example, if a bidirectional construct disclosed herein consists of the hypothetical sequence 5′-CTGGACCGA-3′, it is also meant to encompass the reverse complement of that sequence (5′-TCGGTCCAG-3′). Likewise, when bidirectional construct elements are disclosed herein in a specific 5′ to 3′ order, they are also meant to encompass the reverse complement of the order of those elements. For example, if a bidirectional construct is disclosed herein that comprises from 5′ to 3′ a first splice acceptor, a first coding sequence, a first terminator, a reverse complement of a second terminator, a reverse complement of a second coding sequence, and a reverse complement of a second splice acceptor, it is also meant to encompass a construct comprising from 5′ to 3′ the second splice acceptor, the second coding sequence, the second terminator, a reverse complement of the first terminator, a reverse complement of the first coding sequence, and a reverse complement of the first splice acceptor. One reason for this is that, in many embodiments disclosed herein, the bidirectional constructs are part of a single-stranded recombinant AAV vector. Single-stranded AAV genomes are packaged as either sense (plus-stranded) or anti-sense (minus-stranded genomes), and single-stranded AAV genomes of + and -polarity are packaged with equal frequency into mature rAAV virions. See, e.g., LING et al. (2015) J. Mol. Genet. Med. 9(3):175, Zhou et al. (2008) Mol. Ther. 16(3):494-499, and Samulski et al. (1987) J. Virol. 61:3096-3101, each of which is herein incorporated by reference in its entirety for all purposes.

[0361] When the at least two segments both encode a multidomain therapeutic protein, the at least two segments can encode the same multidomain therapeutic protein or multidomain therapeutic protein. The different multidomain therapeutic proteins can be at least about 90%, at least about 95%, at least about 96%, at least about 97%, at least about 98%, at least about 99%, or at least about 99.5% identical. Preferably, the two segments encode the same multidomain therapeutic protein (i.e., 100% identical).

[0362] Even when the two segments encode the same multidomain therapeutic protein, the coding sequence for the multidomain therapeutic protein in the first segment can differ from the coding sequence for the multidomain therapeutic protein in the second segment. In some bidirectional constructs, the codon usage in the first coding sequence is the same as the codon usage in the second coding sequence. In other bidirectional constructs, the second coding sequence adopts a different codon usage from the codon usage of the first coding sequence in order to reduce hairpin formation. One or both of the coding sequences can be codon-optimized for expression in a host cell. In some bidirectional constructs, only one of the coding sequences is codon-optimized. In some bidirectional constructs, the first coding sequence is codon-optimized. In some bidirectional constructs, the second coding sequence is codon-optimized. In some bidirectional constructs, both coding sequences are codon-optimized. For example, the second multidomain therapeutic protein coding sequence can be codon optimized or may use one or more alternative codons for one or more amino acids of the same multidomain therapeutic protein (i.e., same amino acid sequence) encoded by the multidomain therapeutic protein coding sequence in the first segment. An alternative codon as used herein refers to variations in codon usage for a given amino acid, and may or may not be a preferred or optimized codon (codon optimized) for a given expression system. Preferred codon usage, or codons that are well-tolerated in a given system of expression are known.

[0363] In one example, the second segment comprises a reverse complement of a multidomain therapeutic protein coding sequence that adopts different codon usage from that of the multidomain therapeutic protein coding sequence in the first segment in order to reduce hairpin formation. Such a reverse complement forms base pairs with fewer than all nucleotides of the coding sequence in the first segment, yet it optionally encodes the same polypeptide. In one example, the reverse complement sequence in the second segment is not substantially complementary (e.g., not more than 70% complementary) to the coding sequence in the first segment. In other cases, however, the second segment comprises a reverse complement sequence that is highly complementary (e.g., at least 90% complementary) to the coding sequence in the first segment.

[0364] The second segment can have any percentage of complementarity to the first segment. For example, the second segment sequence can have at least about 30%, at least about 35%, at least about 40%, at least about 45%, at least about 50%, at least about 55%, at least about 60%, at least about 65%, at least about 70%, at least about 75%, at least about 80%, at least about 85%, at least about 90%, at least about 95%, at least about 97%, or at least about 99% complementarity to the first segment. As another example, the second segment sequence can have less than about 30%, less than about 35%, less than about 40%, less than about 45%, less than about 50%, less than about 55%, less than about 60%, less than about 65%, less than about 70%, less than about 75%, less than about 80%, less than about 85%, less than about 90%, less than about 95%, less than about 97%, or less than about 99% complementarity to the first segment. The reverse complement of the second coding sequence can be, in some nucleic acid constructs, not substantially complementary (e.g., not more than 70% complementary) to the first coding sequence, not substantially complementary to a fragment of the first coding sequence, highly complementary (e.g., at least 90% complementary) to the first coding sequence, highly complementary to a fragment of the first coding sequence, about 50% to about 80% identical to the reverse complement of the first coding sequence, or about 60% to about 100% identical to the reverse complement of the first coding sequence.

[0365] The bidirectional constructs disclosed herein can be modified to include any suitable structural feature as needed for any particular use and/or that confers one or more desired function. For example, the bidirectional nucleic acid constructs disclosed herein need not comprise a homology arm and/or can be, for example, homology-independent donor constructs. Owing in part to the bidirectional function of the nucleic acid constructs, the bidirectional constructs can be inserted into a genomic locus in either direction as described herein to allow for efficient insertion and/or expression of the multidomain therapeutic protein.

[0366] In some cases, the bidirectional nucleic acid construct does not comprise a promoter that drives the expression of the multidomain therapeutic protein. For example, the expression of the multidomain therapeutic protein can be driven by a promoter of the host cell (e.g., the endogenous ALB promoter when the transgene is integrated into a host cell's ALB locus). In other cases, the bidirectional nucleic acid construct can comprise one or more promoters operably linked to the coding sequences for the multidomain therapeutic protein. That is, although not required for expression, the constructs disclosed herein may also include transcriptional or translational regulatory sequences such as promoters, enhancers, insulators, internal ribosome entry sites, additional sequences encoding peptides, and/or polyadenylation signals. Some bidirectional constructs can comprise a promoter that drives expression of the first multidomain therapeutic protein coding sequence and/or the reverse complement of a promoter that drives expression of the reverse complement of the second multidomain therapeutic protein coding sequence.

[0367] The bidirectional constructs disclosed herein can be modified to include or exclude any suitable structural feature as needed for any particular use and/or that confers one or more desired functions. For example, some bidirectional nucleic acid constructs disclosed herein do not comprise a homology arm. Owing in part to the bidirectional function of the nucleic acid construct, the bidirectional construct can be inserted into a genomic locus in either direction (orientation) as described herein to allow for efficient insertion and/or expression of a multidomain therapeutic protein.

[0368] The bidirectional constructs can, in some cases, comprise one or more (e.g., two) polyadenylation tail sequences or polyadenylation signal sequences. In some bidirectional constructs, the first segment can comprise a polyadenylation signal sequence. In some bidirectional constructs, the second segment can comprise a polyadenylation signal sequence. In some bidirectional constructs, the first segment can comprise a first polyadenylation signal sequence, and the second segment can comprise a second polyadenylation signal sequence (e.g., a reverse complement of a polyadenylation signal sequence). In some bidirectional constructs, the first segment can comprise a first polyadenylation signal sequence located 3′ of the first coding sequence. In some bidirectional constructs, the second segment can comprise a reverse complement of a second polyadenylation signal sequence located 5′ of the reverse complement of the second coding sequence. In some bidirectional constructs, the first segment can comprise a first polyadenylation signal sequence located 3′ of the first coding sequence, and the second segment can comprise a reverse complement of a second polyadenylation signal sequence located 5′ of the reverse complement of the second coding sequence. The first and second polyadenylation signal sequences can be the same or different. In one example, the first and second polyadenylation signals are different. In a specific example, the first polyadenylation signal is a simian virus 40 (SV40) late polyadenylation signal (or a variant thereof), and the second polyadenylation signal is a bovine growth hormone (BGH) polyadenylation signal (or a variant thereof), or vice versa. For example, one polyadenylation signal can be an SV40 polyadenylation signal, and the other polyadenylation signal can be a BGH polyadenylation signal. In a specific example, one polyadenylation signal can comprise, consist essentially of, or consist of SEQ ID NO: 161, and the other polyadenylation signal can comprise, consist essentially of, or consist of SEQ ID NO: 162.

[0369] In one example, either polyadenylation signal can comprise a BGH polyadenylation signal. For example, the BGH polyadenylation signal can comprise, consist essentially of, or consist of SEQ ID NO: 751. In another example, the polyadenylation signal can comprise an SV40 polyadenylation signal. For example, the SV40 polyadenylation signal can be a unidirectional SV40 late polyadenylation signal. For example, the transcription terminator sequences that are present in the “early” inverse orientation of SV40 can be mutated (e.g., by mutating the reverse strand AAUAAA sequences to AAUCAA). The SV40 polyA is bidirectional, but the polyadenylation in the “late” orientation is more efficient than the polyadenylation in the “early” orientation. For example, the unidirectional SV40 late polyadenylation signal can comprise, consist essentially of, or consist of SEQ ID NO: 752. In another example, a synthetic polyadenylation signal can be used. For example, the synthetic polyadenylation signal can comprise, consist essentially of, or consist of SEQ ID NO: 753. In another example, two or more polyadenylation signals can be used in combination. For example, the polyadenylation signal can comprise a combination of a BGH polyadenylation signal and an SV40 polyadenylation signal (e.g., an SV40 late polyadenylation signal, such as a unidirectional SV40 late polyadenylation signal). For example, the polyadenylation signal can comprise a combination of a BGH polyadenylation signal and a unidirectional SV40 late polyadenylation signal. For example, the BGH polyadenylation signal can comprise, consist essentially of, or consist of SEQ ID NO: 751, and the unidirectional SV40 late polyadenylation signal can comprise, consist essentially of, or consist of SEQ ID NO: 752. In a specific example, the BGH polyadenylation signal can be upstream (5′) of the SV40 polyadenylation signal (e.g., unidirectional SV40 late polyadenylation signal). For example, the combined polyadenylation signal can comprise the sequence set forth in SEQ ID NO: 795. In another example, the polyadenylation signal can comprise a combination of a BGH polyadenylation signal and a synthetic polyadenylation signal. For example, the BGH polyadenylation signal can comprise, consist essentially of, or consist of SEQ ID NO: 751, and the synthetic polyadenylation signal can comprise, consist essentially of, or consist of SEQ ID NO: 753.

[0370] In some embodiments, a stuffer sequence can be used to increase the time between when RNA polymerase transcribes the polyA to the time when it transcribes the next splice acceptor. For example, the stuffer sequence can be used between two different polyadenylation signals (e.g., between a BGH polyadenylation signal and a synthetic polyadenylation signal. For example, the stuffer sequence can comprise, consist essentially of, or consist of SEQ ID NO: 754.

[0371] In some embodiments, MAZ elements that cause polymerase pausing are used in combination with a polyadenylation signal (e.g., a BGH polyadenylation signal or an SV40 polyadenylation signal). For example, one or more (e.g., at least 1, at least 2, at least 3, at least 4, or about 1 to about 4, about 2 to about 4, about 3 to about 4, or 1, 2, 3, or 4) MAZ elements can be used in combination with a polyadenylation signal. For example, the MAZ element can comprise, consist essentially of, or consist of SEQ ID NO: 755.

[0372] In some embodiments, unidirectional SV40 late polyadenylation signals are used. The SV40 polyA is bidirectional, but the polyadenylation in the “late” orientation is more efficient than the polyadenylation in the “early” orientation. The unidirectional SV40 late polyadenylation signals described herein are positioned in the “late” orientation, with the polyadenylation signals present in the “early” orientation mutated or inactivated. In some embodiments, each instance of the sequence AATAAA in the reverse strand is mutated in the unidirectional SV40 late polyadenylation signal. For example, the two conserved AATAAA poly(A) signals present in the SV40 “early” poly(A) to AATCAA. In some embodiments, the unidirectional SV40 late polyadenylation signal is at least 95%, at least 96%, at least 97%, at least 98%, or at least 99% identical to the sequence set forth in SEQ ID NO: 752. In some embodiments, the unidirectional SV40 late polyadenylation signal comprises, consists essentially of, or consists of the sequence set forth in SEQ ID NO: 752.

[0373] The unidirectional SV40 late polyadenylation signals can be used in combination with (e.g., in tandem with) one or more additional polyadenylation signals. Examples of transcription terminators that can be used include, for example, the human growth hormone (HGH) polyadenylation signal, the simian virus 40 (SV40) late polyadenylation signal, the rabbit beta-globin polyadenylation signal, the bovine growth hormone (BGH) polyadenylation signal, the phosphoglycerate kinase (PGK) polyadenylation signal, an AOX1 transcription termination sequence, a CYC1 transcription termination sequence, or any transcription termination sequence known to be suitable for regulating gene expression in eukaryotic cells. For example, the unidirectional SV40 late polyadenylation signals can be used in combination with (e.g., in tandem with) a bovine growth hormone (BGH) polyadenylation signal, optionally wherein the BGH polyadenylation signal is upstream of (5′ of) the unidirectional SV40 late polyadenylation signal. In some embodiments, the BGH polyadenylation signal is at least 95%, at least 96%, at least 97%, at least 98%, or at least 99% identical to the sequence set forth in SEQ ID NO: 751. In some embodiments, the BGH polyadenylation signal comprises, consists essentially of, or consists of the sequence set forth in SEQ ID NO: 751. In some embodiments, the combination of the BGH polyadenylation signal and the unidirectional SV40 late polyadenylation signal is at least 95%, at least 96%, at least 97%, at least 98%, or at least 99% identical to the sequence set forth in SEQ ID NO: 795. In some embodiments, the combination of the BGH polyadenylation signal and the unidirectional SV40 late polyadenylation signal comprises, consists essentially of, or consists of the sequence set forth in SEQ ID NO: 795.

[0374] In some embodiments, a stuffer sequence can be used to increase the time between when RNA polymerase transcribes the polyA to the time when it transcribes the next splice acceptor. For example, the stuffer sequence can be used between two different polyadenylation signals (e.g., between a BGH polyadenylation signal and a synthetic polyadenylation signal. For example, the stuffer sequence can comprise, consist essentially of, or consist of SEQ ID NO: 754.

[0375] In some embodiments, MAZ elements that cause polymerase pausing are used in combination with a polyadenylation signal (e.g., a BGH polyadenylation signal or an SV40 polyadenylation signal). For example, one or more (e.g., at least 1, at least 2, at least 3, at least 4, or about 1 to about 4, about 2 to about 4, about 3 to about 4, or 1, 2, 3, or 4) MAZ elements can be used in combination with a polyadenylation signal. For example, the MAZ element can comprise, consist essentially of, or consist of SEQ ID NO: 755.

[0376] In some bidirectional constructs, both the first segment and the second segment comprise a polyadenylation tail sequence. Methods of designing a suitable polyadenylation tail sequence are known. For example, in some bidirectional constructs, one or both of the first and second segment comprises a polyadenylation tail sequence and/or a polyadenylation signal sequence downstream of an open reading frame (i.e., a polyadenylation tail sequence and/or a polyadenylation signal sequence 3′ of a coding sequence, or a reverse complement of a polyadenylation tail sequence and/or a polyadenylation signal sequence 5′ of a reverse complement of a coding sequence). The polyadenylation tail sequence can be encoded, for example, as a “poly-A” stretch downstream of the multidomain therapeutic protein coding sequence (or other protein coding sequence) in the first and/or second segment. A poly-A tail can comprise, for example, at least 20, 30, 40, 50, 60, 70, 80, 90, or 100 adenines, and optionally up to 300 adenines. In a specific example, the poly-A tail comprises 95, 96, 97, 98, 99, or 100 adenine nucleotides. Methods of designing a suitable polyadenylation tail sequence and/or polyadenylation signal sequence are well known. For example, the polyadenylation signal sequence AAUAAA is commonly used in mammalian systems, although variants such as UAUAAA or AU/GUAAA have been identified. See, e.g., Proudfoot (2011) Genes & Dev. 25(17):1770-82, herein incorporated by reference in its entirety for all purposes. In some bidirectional constructs, a single bidirectional terminator can be used to terminate RNA polymerase transcription in either the sense or the antisense direction (i.e., to terminate RNA polymerase transcription from both the first segment and the second segment). Examples of bidirectional terminators include the ARO4, TRP1, TRP4, ADH1, CYC1, GAL1, GAL7, and GAL10 terminators.

[0377] The bidirectional constructs can, in some cases, comprise one or more (e.g., two) splice acceptor sites. In some bidirectional constructs, the first segment can comprise a splice acceptor site. In some bidirectional constructs, the second segment can comprise a splice acceptor site. In some bidirectional constructs, the first segment can comprise a first splice acceptor site, and the second segment can comprise a second splice acceptor site (e.g., a reverse complement of a splice acceptor site). In some bidirectional constructs, the first segment comprises a first splice acceptor site located 5′ of the first coding sequence. In some bidirectional constructs, the second segment comprises a reverse complement of a second splice acceptor site located 3′ of the reverse complement of the second coding sequence. In some bidirectional constructs, the first segment comprises a first splice acceptor site located 5′ of the first coding sequence, and the second segment comprises a reverse complement of a second splice acceptor site located 3′ of the reverse complement of the second coding sequence. The first and second splice acceptor sites can be the same or different. In a specific example, both splice acceptors are mouse Alb exon 2 splice acceptors. In a specific example, both splice acceptors can comprise, consist essentially of, or consist of SEQ ID NO: 163.

[0378] A bidirectional construct may comprise a first coding sequence that encodes a first coding sequence linked to a splice acceptor and a reverse complement of a second coding sequence operably linked to the reverse complement of a splice acceptor. The bidirectional constructs disclosed herein can also comprise a splice acceptor site on either or both ends of the construct, or splice acceptor sites in both the first segment and the second segment (e.g., a splice acceptor site 5′ of a coding sequence, or a reverse complement of a splice acceptor 3′ of a reverse complement of a coding sequence). The splice acceptor site can, for example, comprise NAG or consist of NAG. In a specific example, the splice acceptor is an ALB splice acceptor (e.g., an ALB splice acceptor used in the splicing together of exons 1 and 2 of ALB (i.e., ALB exon 2 splice acceptor)). For example, such a splice acceptor can be derived from the human ALB gene. In another example, the splice acceptor can be derived from the mouse Alb gene (e.g., an ALB splice acceptor used in the splicing together of exons 1 and 2 of mouse Alb (i.e., mouse Alb exon 2 splice acceptor)). In another example, the splice acceptor is a splice acceptor from a gene encoding the multidomain therapeutic protein. Additional suitable splice acceptor sites useful in eukaryotes, including artificial splice acceptors, are known. See, e.g., Shapiro et al. (1987) Nucleic Acids Res. 15:7155-7174 and Burset et al. (2001) Nucleic Acids Res. 29:255-259, each of which is herein incorporated by reference in its entirety for all purposes. The splice acceptors used in a bidirectional construct may be the same or different. In a specific example, both splice acceptors are mouse Alb exon 2 splice acceptors.

[0379] The bidirectional constructs can be circular or linear. For example, a bidirectional construct can be linear. The first and second segments can be joined in a linear manner through a linker sequence. For example, the 5′ end of the second segment that comprises a reverse complement sequence can be linked to the 3′ end of the first segment. Alternatively, the 5′ end of the first segment can be linked to the 3′ end of the second segment that comprises a reverse complement sequence. The linker can be any suitable length. For example, the linker can be between about 5 to about 2000 nucleotides in length. As an example, the linker sequence can be about 1, about 2, about 3, about 4, about 5, about 6, about 7, about 8, about 9, about 10, about 11, about 12, about 13, about 14, about 15, about 16, about 17, about 18, about 19, about 20, about 25, about 30, about 35, about 40, about 45, about 50, about 55, about 60, about 65, about 70, about 75, about 80, about 85, about 90, about 95, about 100, about 150, about 200, about 250, about 300, about 500, about 1000, about 1500, about 2000, or more nucleotides in length. Other structural elements in addition to, or instead of, a linker sequence, can also be inserted between the first and second segments.

[0380] The bidirectional constructs disclosed herein can be DNA or RNA, single-stranded, double-stranded, or partially single-stranded and partially double-stranded. For example, the constructs can be single- or double-stranded DNA. In some embodiments, the nucleic acid can be modified (e.g., using nucleoside analogs), as described herein. In a specific example, the bidirectional construct is single-stranded (e.g., single-stranded DNA).

[0381] The bidirectional constructs disclosed herein can be modified on either or both ends to include one or more suitable structural features as needed and/or to confer one or more functional benefit. For example, structural modifications can vary depending on the method(s) used to deliver the constructs disclosed herein to a host cell (e.g., use of viral vector delivery or packaging into lipid nanoparticles for delivery). Such modifications include, for example, terminal structures such as inverted terminal repeats (ITR), hairpin, loops, and other structures such as toroids. For example, the constructs disclosed herein can comprise one, two, or three ITRs or can comprise no more than two ITRs. Various methods of structural modifications are known.

[0382] Similarly, one or both ends of the construct can be protected (e.g., from exonucleolytic degradation) by known methods. For example, one or more dideoxynucleotide residues can be added to the 3′ terminus of a linear molecule and/or self-complementary oligonucleotides can be ligated to one or both ends. See, e.g., Chang et al. (1987) Proc. Natl. Acad. Sci. U.S.A. 84:4959-4963 and Nehls et al. (1996) Science 272:886-889, each of which is herein incorporated by reference in its entirety for all purposes. Additional methods for protecting the constructs from degradation include, but are not limited to, addition of terminal amino group(s) and the use of modified internucleotide linkages such as, for example, phosphorothioates, phosphoramidates, and O-methyl ribose or deoxyribose residues.

[0383] As disclosed in more detail herein, the bidirectional constructs disclosed herein can be introduced into a cell as part of a vector having additional sequences such as, for example, replication origins, promoters, and genes encoding antibiotic resistance. The constructs can be introduced as a naked nucleic acid, can be introduced as a nucleic acid complexed with an agent such as a liposome, polymer, or poloxamer, or can be delivered by viral vectors (e.g., adenovirus, AAV, herpesvirus, retrovirus, lentivirus).

[0384] In an exemplary bidirectional construct, the second segment is located 3′ of the first segment, the first multidomain therapeutic protein coding sequence and the second multidomain therapeutic protein coding sequence both encode the same multidomain therapeutic protein, the second multidomain therapeutic protein coding sequence adopts a different codon usage from the codon usage of the first multidomain therapeutic protein coding sequence, the first segment comprises a first polyadenylation signal sequence located 3′ of the first multidomain therapeutic protein coding sequence, the second segment comprises a reverse complement of a second polyadenylation signal sequence located 5′ of the reverse complement of the second multidomain therapeutic protein coding sequence, the first segment comprises a first splice acceptor site located 5′ of the first multidomain therapeutic protein coding sequence, the second segment comprises a reverse complement of a second splice acceptor site located 3′ of the reverse complement of the second multidomain therapeutic protein coding sequence, the nucleic acid construct does not comprise a promoter that drives expression of the first multidomain therapeutic protein or the second multidomain therapeutic protein, and optionally the nucleic acid construct does not comprise a homology arm.

### (3) Unidirectional Constructs

[0385] The nucleic acid constructs disclosed herein can be unidirectional constructs. When specific unidirectional construct sequences are disclosed herein, they are meant to encompass the sequence disclosed or the reverse complement of the sequence. For example, if a unidirectional construct disclosed herein consists of the hypothetical sequence 5′-CTGGACCGA-3′, it is also meant to encompass the reverse complement of that sequence (5′-TCGGTCCAG-3′). Likewise, when unidirectional construct elements are disclosed herein in a specific 5′ to 3′ order, they are also meant to encompass the reverse complement of the order of those elements. One reason for this is that, in many embodiments disclosed herein, the unidirectional constructs are part of a single-stranded recombinant AAV vector. Single-stranded AAV genomes are packaged as either sense (plus-stranded) or anti-sense (minus-stranded genomes), and single-stranded AAV genomes of + and − polarity are packaged with equal frequency into mature rAAV virions. See, e.g., LING et al. (2015) J. Mol. Genet. Med. 9(3):175, Zhou et al. (2008) Mol. Ther. 16(3):494-499, and Samulski et al. (1987) J. Virol. 61:3096-3101, each of which is herein incorporated by reference in its entirety for all purposes.

[0386] In the unidirectional constructs, the coding sequence for the multidomain therapeutic protein can be codon-optimized for expression in a host cell. For example, the coding sequence can be codon optimized or may use one or more alternative codons for one or more amino acids of the multidomain therapeutic protein (i.e., same amino acid sequence). An alternative codon as used herein refers to variations in codon usage for a given amino acid, and may or may not be a preferred or optimized codon (codon optimized) for a given expression system. Preferred codon usage, or codons that are well-tolerated in a given system of expression, are known.

[0387] The unidirectional constructs disclosed herein can be modified to include any suitable structural feature as needed for any particular use and/or that confers one or more desired functions. For example, the unidirectional nucleic acid constructs disclosed herein need not comprise a homology arm and/or can be, for example, homology-independent donor constructs.

[0388] In some cases, the unidirectional nucleic acid construct does not comprise a promoter that drives the expression of multidomain therapeutic protein. For example, the expression of the multidomain therapeutic protein can be driven by a promoter of the host cell (e.g., the endogenous ALB promoter when the transgene is integrated into a host cell's ALB locus). In other cases, the unidirectional nucleic acid construct can comprise one or more promoters operably linked to the coding sequence for the multidomain therapeutic protein. That is, although not required for expression, the constructs disclosed herein may also include transcriptional or translational regulatory sequences such as promoters, enhancers, insulators, internal ribosome entry sites, additional sequences encoding peptides, and/or polyadenylation signals. Some unidirectional constructs can comprise a promoter that drives expression of the coding sequence for the multidomain therapeutic protein.

[0389] The unidirectional constructs can, in some cases, comprise one or more polyadenylation tail sequences or polyadenylation signal sequences. Some unidirectional constructs can comprise a polyadenylation signal sequence located 3′ of the coding sequence for the multidomain therapeutic protein. In a specific example, the polyadenylation signal is a simian virus 40 (SV40) late polyadenylation signal (or a variant thereof). In another specific example, the polyadenylation signal is a bovine growth hormone (BGH) polyadenylation signal (or a variant thereof). In another specific example, the polyadenylation signal is a BGH polyadenylation signal. For example, the polyadenylation signal can be an SV40 polyadenylation signal or a BGH polyadenylation signal. In a specific example, the polyadenylation signal can comprise, consist essentially of, or consist of SEQ ID NO: 161. In another specific example, the polyadenylation signal can comprise, consist essentially of, or consist of SEQ ID NO: 162.

[0390] In one example, the polyadenylation signal can comprise a BGH polyadenylation signal. For example, the BGH polyadenylation signal can comprise, consist essentially of, or consist of SEQ ID NO: 751. In another example, the polyadenylation signal can comprise an SV40 polyadenylation signal. For example, the SV40 polyadenylation signal can be a unidirectional SV40 late polyadenylation signal. For example, the transcription terminator sequences that are present in the “early” inverse orientation of SV40 can be mutated (e.g., by mutating the reverse strand AAUAAA sequences to AAUCAA). The SV40 polyA is bidirectional, but the polyadenylation in the “late” orientation is more efficient than the polyadenylation in the “early” orientation. For example, the unidirectional SV40 late polyadenylation signal can comprise, consist essentially of, or consist of SEQ ID NO: 752. In another example, a synthetic polyadenylation signal can be used. For example, the synthetic polyadenylation signal can comprise, consist essentially of, or consist of SEQ ID NO: 753. In another example, two or more polyadenylation signals can be used in combination. For example, the polyadenylation signal can comprise a combination of a BGH polyadenylation signal and an SV40 polyadenylation signal (e.g., an SV40 late polyadenylation signal, such as a unidirectional SV40 late polyadenylation signal). For example, the polyadenylation signal can comprise a combination of a BGH polyadenylation signal and a unidirectional SV40 late polyadenylation signal. For example, the BGH polyadenylation signal can comprise, consist essentially of, or consist of SEQ ID NO: 751, and the unidirectional SV40 late polyadenylation signal can comprise, consist essentially of, or consist of SEQ ID NO: 752. In a specific example, the BGH polyadenylation signal can be upstream (5′) of the SV40 polyadenylation signal (e.g., unidirectional SV40 late polyadenylation signal). For example, the combined polyadenylation signal can comprise the sequence set forth in SEQ ID NO: 795. In another example, the polyadenylation signal can comprise a combination of a BGH polyadenylation signal and a synthetic polyadenylation signal. For example, the BGH polyadenylation signal can comprise, consist essentially of, or consist of SEQ ID NO: 751, and the synthetic polyadenylation signal can comprise, consist essentially of, or consist of SEQ ID NO: 753.

[0391] In some embodiments, a stuffer sequence can be used to increase the time between when RNA polymerase transcribes the polyA to the time when it transcribes the next splice acceptor. For example, the stuffer sequence can be used between two different polyadenylation signals (e.g., between a BGH polyadenylation signal and a synthetic polyadenylation signal. For example, the stuffer sequence can comprise, consist essentially of, or consist of SEQ ID NO: 754.

[0392] In some embodiments, MAZ elements that cause polymerase pausing are used in combination with a polyadenylation signal (e.g., a BGH polyadenylation signal or an SV40 polyadenylation signal). For example, one or more (e.g., at least 1, at least 2, at least 3, at least 4, or about 1 to about 4, about 2 to about 4, about 3 to about 4, or 1, 2, 3, or 4) MAZ elements can be used in combination with a polyadenylation signal. For example, the MAZ element can comprise, consist essentially of, or consist of SEQ ID NO: 755.

[0393] In some embodiments, unidirectional SV40 late polyadenylation signals are used. The SV40 polyA is bidirectional, but the polyadenylation in the “late” orientation is more efficient than the polyadenylation in the “early” orientation. The unidirectional SV40 late polyadenylation signals described herein are positioned in the “late” orientation, with the polyadenylation signals present in the “early” orientation mutated or inactivated. In some embodiments, each instance of the sequence AATAAA in the reverse strand is mutated in the unidirectional SV40 late polyadenylation signal. For example, the two conserved AATAAA poly(A) signals present in the SV40 “early” poly(A) to AATCAA. In some embodiments, the unidirectional SV40 late polyadenylation signal is at least 95%, at least 96%, at least 97%, at least 98%, or at least 99% identical to the sequence set forth in SEQ ID NO: 752. In some embodiments, the unidirectional SV40 late polyadenylation signal comprises, consists essentially of, or consists of the sequence set forth in SEQ ID NO: 752.

[0394] The unidirectional SV40 late polyadenylation signals can be used in combination with (e.g., in tandem with) one or more additional polyadenylation signals. Examples of transcription terminators that can be used include, for example, the human growth hormone (HGH) polyadenylation signal, the simian virus 40 (SV40) late polyadenylation signal, the rabbit beta-globin polyadenylation signal, the bovine growth hormone (BGH) polyadenylation signal, the phosphoglycerate kinase (PGK) polyadenylation signal, an AOX1 transcription termination sequence, a CYC1 transcription termination sequence, or any transcription termination sequence known to be suitable for regulating gene expression in eukaryotic cells. For example, the unidirectional SV40 late polyadenylation signals can be used in combination with (e.g., in tandem with) a bovine growth hormone (BGH) polyadenylation signal, optionally wherein the BGH polyadenylation signal is upstream of (5′ of) the unidirectional SV40 late polyadenylation signal. In some embodiments, the BGH polyadenylation signal is at least 95%, at least 96%, at least 97%, at least 98%, or at least 99% identical to the sequence set forth in SEQ ID NO: 751. In some embodiments, the BGH polyadenylation signal comprises, consists essentially of, or consists of the sequence set forth in SEQ ID NO: 751. In some embodiments, the combination of the BGH polyadenylation signal and the unidirectional SV40 late polyadenylation signal is at least 95%, at least 96%, at least 97%, at least 98%, or at least 99% identical to the sequence set forth in SEQ ID NO: 795. In some embodiments, the combination of the BGH polyadenylation signal and the unidirectional SV40 late polyadenylation signal comprises, consists essentially of, or consists of the sequence set forth in SEQ ID NO: 795.

[0395] In some embodiments, a stuffer sequence can be used to increase the time between when RNA polymerase transcribes the polyA to the time when it transcribes the next splice acceptor. For example, the stuffer sequence can be used between two different polyadenylation signals (e.g., between a BGH polyadenylation signal and a synthetic polyadenylation signal. For example, the stuffer sequence can comprise, consist essentially of, or consist of SEQ ID NO: 754.

[0396] In some embodiments, MAZ elements that cause polymerase pausing are used in combination with a polyadenylation signal (e.g., a BGH polyadenylation signal or an SV40 polyadenylation signal). For example, one or more (e.g., at least 1, at least 2, at least 3, at least 4, or about 1 to about 4, about 2 to about 4, about 3 to about 4, or 1, 2, 3, or 4) MAZ elements can be used in combination with a polyadenylation signal. For example, the MAZ element can comprise, consist essentially of, or consist of SEQ ID NO: 755.

[0397] Methods of designing a suitable polyadenylation tail sequence are known. For example, some unidirectional constructs comprise a polyadenylation tail sequence and/or a polyadenylation signal sequence downstream of an open reading frame (i.e., a polyadenylation tail sequence and/or a polyadenylation signal sequence 3′ of a coding sequence). The polyadenylation tail sequence can be encoded, for example, as a “poly-A” stretch downstream of the coding sequence for the multidomain therapeutic protein (or other protein coding sequence) in the first and/or second segment. A poly-A tail can comprise, for example, at least 20, 30, 40, 50, 60, 70, 80, 90, or 100 adenines, and optionally up to 300 adenines. In a specific example, the poly-A tail comprises 95, 96, 97, 98, 99, or 100 adenine nucleotides. Methods of designing a suitable polyadenylation tail sequence and/or polyadenylation signal sequence are well known. For example, the polyadenylation signal sequence AAUAAA is commonly used in mammalian systems, although variants such as UAUAAA or AU/GUAAA have been identified. See, e.g., Proudfoot (2011) Genes & Dev. 25(17):1770-82, herein incorporated by reference in its entirety for all purposes.

[0398] The unidirectional constructs can, in some cases, comprise one or more splice acceptor sites. Some unidirectional constructs comprise a splice acceptor site located 5′ of the coding sequence for the multidomain therapeutic protein. In a specific example, the splice acceptor is a mouse Alb exon 2 splice acceptor. In a specific example, the splice acceptor can comprise, consist essentially of, or consist of SEQ ID NO: 163.

[0399] The splice acceptor site can, for example, comprise NAG or consist of NAG. In a specific example, the splice acceptor is an ALB splice acceptor (e.g., an ALB splice acceptor used in the splicing together of exons 1 and 2 of ALB (i.e., ALB exon 2 splice acceptor)). For example, such a splice acceptor can be derived from the human ALB gene. In another example, the splice acceptor can be derived from the mouse Alb gene (e.g., an ALB splice acceptor used in the splicing together of exons 1 and 2 of mouse Alb (i.e., mouse Alb exon 2 splice acceptor)). In another example, the splice acceptor is a splice acceptor from the gene encoding the multidomain therapeutic protein. Additional suitable splice acceptor sites useful in eukaryotes, including artificial splice acceptors, are known. See, e.g., Shapiro et al. (1987) Nucleic Acids Res. 15:7155-7174 and Burset et al. (2001) Nucleic Acids Res. 29:255-259, each of which is herein incorporated by reference in its entirety for all purposes.

[0400] The unidirectional constructs can be circular or linear. For example, a unidirectional construct can be linear.

[0401] The unidirectional constructs disclosed herein can be DNA or RNA, single-stranded, double-stranded, or partially single-stranded and partially double-stranded. For example, the constructs can be single- or double-stranded DNA. In some embodiments, the nucleic acid can be modified (e.g., using nucleoside analogs), as described herein. In a specific example, the unidirectional construct is single-stranded (e.g., single-stranded DNA).

[0402] The unidirectional constructs disclosed herein can be modified on either or both ends to include one or more suitable structural features as needed and/or to confer one or more functional benefit. For example, structural modifications can vary depending on the method(s) used to deliver the constructs disclosed herein to a host cell (e.g., use of viral vector delivery or packaging into lipid nanoparticles for delivery). Such modifications include, for example, terminal structures such as inverted terminal repeats (ITR), hairpin, loops, and other structures such as toroids. For example, the constructs disclosed herein can comprise one, two, or three JTRs or can comprise no more than two JTRs. Various methods of structural modifications are known.

[0403] Similarly, one or both ends of the construct can be protected (e.g., from exonucleolytic degradation) by known methods. For example, one or more dideoxynucleotide residues can be added to the 3′ terminus of a linear molecule and/or self-complementary oligonucleotides can be ligated to one or both ends. See, e.g., Chang et al. (1987) Proc. Natl. Acad. Sci. U.S.A. 84:4959-4963 and Nehls et al. (1996) Science 272:886-889, each of which is herein incorporated by reference in its entirety for all purposes. Additional methods for protecting the constructs from degradation include, but are not limited to, addition of terminal amino group(s) and the use of modified internucleotide linkages such as, for example, phosphorothioates, phosphoramidates, and O-methyl ribose or deoxyribose residues.

[0404] As disclosed in more detail herein, the unidirectional constructs disclosed herein can be introduced into a cell as part of a vector having additional sequences such as, for example, replication origins, promoters, and genes encoding antibiotic resistance. The constructs can be introduced as a naked nucleic acid, can be introduced as a nucleic acid complexed with an agent such as a liposome, polymer, or poloxamer, or can be delivered by viral vectors (e.g., adenovirus, AAV, herpesvirus, retrovirus, lentivirus).

[0405] In an exemplary unidirectional construct, the construct comprises a polyadenylation signal sequence located 3′ of the coding sequence for the multidomain therapeutic protein, the construct comprises a splice acceptor site located 5′ of the coding sequence for the multidomain therapeutic protein, and the nucleic acid construct does not comprise a promoter that drives expression of the multidomain therapeutic protein, and optionally the nucleic acid construct does not comprise a homology arm.

### (4) Multidomain Therapeutic Protein Nucleic Acid Constructs

[0406] The multidomain therapeutic protein nucleic acid constructs disclosed herein can be unidirectional constructs or bidirectional constructs. When specific construct sequences are disclosed herein, they are meant to encompass the sequence disclosed or the reverse complement of the sequence. For example, if a construct disclosed herein consists of the hypothetical sequence 5′-CTGGACCGA-3′, it is also meant to encompass the reverse complement of that sequence (5′-TCGGTCCAG-3′). Likewise, when construct elements are disclosed herein in a specific 5′ to 3′ order, they are also meant to encompass the reverse complement of the order of those elements. One reason for this is that, in many embodiments disclosed herein, the constructs are part of a single-stranded recombinant AAV vector. Single-stranded AAV genomes are packaged as either sense (plus-stranded) or anti-sense (minus-stranded genomes), and single-stranded AAV genomes of + and − polarity are packaged with equal frequency into mature rAAV virions. See, e.g., LING et al. (2015) J. Mol. Genet. Med. 9(3):175, Zhou et al. (2008) Mol. Ther. 16(3):494-499, and Samulski et al. (1987) J. Virol. 61:3096-3101, each of which is herein incorporated by reference in its entirety for all purposes.

[0407] In the nucleic acid constructs, the multidomain therapeutic protein coding sequence, the TfR-binding delivery domain or CD63-binding delivery domain coding sequence, and/or the GAA coding sequence can be codon-optimized for expression in a host cell. For example, the multidomain therapeutic protein coding sequence, the TfR-binding delivery domain or CD63-binding delivery domain coding sequence, and/or the GAA coding sequence can be codon optimized or may use one or more alternative codons for one or more amino acids of the protein (i.e., same amino acid sequence). An alternative codon as used herein refers to variations in codon usage for a given amino acid, and may or may not be a preferred or optimized codon (codon optimized) for a given expression system. Preferred codon usage, or codons that are well-tolerated in a given system of expression, are known.

[0408] The nucleic acid constructs disclosed herein can be modified to include any suitable structural feature as needed for any particular use and/or that confers one or more desired functions. For example, the nucleic acid constructs disclosed herein need not comprise a homology arm and/or can be, for example, homology-independent donor constructs.

[0409] In some cases, the nucleic acid construct does not comprise a promoter that drives the expression of the multidomain therapeutic protein. For example, the expression of the multidomain therapeutic protein can be driven by a promoter of the host cell (e.g., the endogenous ALB promoter when the transgene is integrated into a host cell's ALB locus). In other cases, the nucleic acid construct can comprise one or more promoters operably linked to the multidomain therapeutic protein coding sequence. That is, although not required for expression, the constructs disclosed herein may also include transcriptional or translational regulatory sequences such as promoters, enhancers, insulators, internal ribosome entry sites, additional sequences encoding peptides, and/or polyadenylation signals. Some nucleic acid constructs can comprise a promoter that drives expression of the multidomain therapeutic protein. For example, the promoter may be a liver-specific promoter. Examples of liver-specific promoters include TTR promoters, such as human or mouse TTR promoters. In one example, the construct may comprise a TTR promoter, such as a mouse TTR promoter or a human TTR promoter (e.g., the coding sequence for the multidomain therapeutic protein is operably linked to the TTR promoter). In one example, the construct may comprise a SERPINA1 enhancer, such as a mouse SERPINA1 enhancer or a human SERPINA1 enhancer (e.g., the coding sequence for the multidomain therapeutic protein is operably linked to the SERPINA1 enhancer). In one example, the construct may comprise a TTR promoter and a SERPINA1 enhancer, such as a human SERPINA1 enhancer and a mouse TTR promoter (e.g., the coding sequence for the multidomain therapeutic protein is operably linked to the SERPINA1 enhancer and the TTR promoter).

[0410] The nucleic acid constructs can, in some cases, comprise one or more polyadenylation tail sequences or polyadenylation signal sequences. Some nucleic acid constructs can comprise a polyadenylation signal sequence located 3′ of the multidomain therapeutic protein coding sequence. In a specific example, the polyadenylation signal is a simian virus 40 (SV40) late polyadenylation signal (or a variant thereof). In another specific example, the polyadenylation signal is a bovine growth hormone (BGH) polyadenylation signal (or a variant thereof). In another specific example, the polyadenylation signal is a CpG-depleted BGH polyadenylation signal. For example, the polyadenylation signal can be an SV40 polyadenylation signal or a CpG-depleted BGH polyadenylation signal. For example, the polyadenylation signal can comprise, consist essentially of, or consist of SEQ ID NO: 615, 169, or 161. In a specific example, the polyadenylation signal can comprise, consist essentially of, or consist of SEQ ID NO: 615. In a specific example, the polyadenylation signal can comprise, consist essentially of, or consist of SEQ ID NO: 169. In another specific example, the polyadenylation signal can comprise, consist essentially of, or consist of SEQ ID NO: 161. In another specific example, the polyadenylation signal can comprise, consist essentially of, or consist of SEQ ID NO: 162.

[0411] In one example, the polyadenylation signal can comprise a BGH polyadenylation signal. For example, the BGH polyadenylation signal can comprise, consist essentially of, or consist of SEQ ID NO: 751. In another example, the polyadenylation signal can comprise an SV40 polyadenylation signal. For example, the SV40 polyadenylation signal can be a unidirectional SV40 late polyadenylation signal. For example, the transcription terminator sequences that are present in the “early” inverse orientation of SV40 can be mutated (e.g., by mutating the reverse strand AAUAAA sequences to AAUCAA). The SV40 polyA is bidirectional, but the polyadenylation in the “late” orientation is more efficient than the polyadenylation in the “early” orientation. For example, the unidirectional SV40 late polyadenylation signal can comprise, consist essentially of, or consist of SEQ ID NO: 752. In another example, a synthetic polyadenylation signal can be used. For example, the synthetic polyadenylation signal can comprise, consist essentially of, or consist of SEQ ID NO: 753. In another example, two or more polyadenylation signals can be used in combination. For example, the polyadenylation signal can comprise a combination of a BGH polyadenylation signal and an SV40 polyadenylation signal (e.g., an SV40 late polyadenylation signal, such as a unidirectional SV40 late polyadenylation signal). For example, the polyadenylation signal can comprise a combination of a BGH polyadenylation signal and a unidirectional SV40 late polyadenylation signal. For example, the BGH polyadenylation signal can comprise, consist essentially of, or consist of SEQ ID NO: 751, and the unidirectional SV40 late polyadenylation signal can comprise, consist essentially of, or consist of SEQ ID NO: 752. In a specific example, the BGH polyadenylation signal can be upstream (5′) of the SV40 polyadenylation signal (e.g., unidirectional SV40 late polyadenylation signal). For example, the combined polyadenylation signal can comprise the sequence set forth in SEQ ID NO: 795. In another example, the polyadenylation signal can comprise a combination of a BGH polyadenylation signal and a synthetic polyadenylation signal. For example, the BGH polyadenylation signal can comprise, consist essentially of, or consist of SEQ ID NO: 751, and the synthetic polyadenylation signal can comprise, consist essentially of, or consist of SEQ ID NO: 753. In some embodiments, the nucleic acid construct is a unidirectional construct.

[0412] In some embodiments, a stuffer sequence can be used to increase the time between when RNA polymerase transcribes the polyA to the time when it transcribes the next splice acceptor. For example, the stuffer sequence can be used between two different polyadenylation signals (e.g., between a BGH polyadenylation signal and a synthetic polyadenylation signal. For example, the stuffer sequence can comprise, consist essentially of, or consist of SEQ ID NO: 754.

[0413] In some embodiments, MAZ elements that cause polymerase pausing are used in combination with a polyadenylation signal (e.g., a BGH polyadenylation signal or an SV40 polyadenylation signal). For example, one or more (e.g., at least 1, at least 2, at least 3, at least 4, or about 1 to about 4, about 2 to about 4, about 3 to about 4, or 1, 2, 3, or 4) MAZ elements can be used in combination with a polyadenylation signal. For example, the MAZ element can comprise, consist essentially of, or consist of SEQ ID NO: 755.

[0414] In some embodiments, unidirectional SV40 late polyadenylation signals are used. The SV40 polyA is bidirectional, but the polyadenylation in the “late” orientation is more efficient than the polyadenylation in the “early” orientation. The unidirectional SV40 late polyadenylation signals described herein are positioned in the “late” orientation, with the polyadenylation signals present in the “early” orientation mutated or inactivated. In some embodiments, each instance of the sequence AATAAA in the reverse strand is mutated in the unidirectional SV40 late polyadenylation signal. For example, the two conserved AATAAA poly(A) signals present in the SV40 “early” poly(A) to AATCAA. In some embodiments, the unidirectional SV40 late polyadenylation signal is at least 95%, at least 96%, at least 97%, at least 98%, or at least 99% identical to the sequence set forth in SEQ ID NO: 752. In some embodiments, the unidirectional SV40 late polyadenylation signal comprises, consists essentially of, or consists of the sequence set forth in SEQ ID NO: 752.

[0415] The unidirectional SV40 late polyadenylation signals can be used in combination with (e.g., in tandem with) one or more additional polyadenylation signals. Examples of transcription terminators that can be used include, for example, the human growth hormone (HGH) polyadenylation signal, the simian virus 40 (SV40) late polyadenylation signal, the rabbit beta-globin polyadenylation signal, the bovine growth hormone (BGH) polyadenylation signal, the phosphoglycerate kinase (PGK) polyadenylation signal, an AOX1 transcription termination sequence, a CYC1 transcription termination sequence, or any transcription termination sequence known to be suitable for regulating gene expression in eukaryotic cells. For example, the unidirectional SV40 late polyadenylation signals can be used in combination with (e.g., in tandem with) a bovine growth hormone (BGH) polyadenylation signal, optionally wherein the BGH polyadenylation signal is upstream of (5′ of) the unidirectional SV40 late polyadenylation signal. In some embodiments, the BGH polyadenylation signal is at least 95%, at least 96%, at least 97%, at least 98%, or at least 99% identical to the sequence set forth in SEQ ID NO: 751. In some embodiments, the BGH polyadenylation signal comprises, consists essentially of, or consists of the sequence set forth in SEQ ID NO: 751. In some embodiments, the combination of the BGH polyadenylation signal and the unidirectional SV40 late polyadenylation signal is at least 95%, at least 96%, at least 97%, at least 98%, or at least 99% identical to the sequence set forth in SEQ ID NO: 795. In some embodiments, the combination of the BGH polyadenylation signal and the unidirectional SV40 late polyadenylation signal comprises, consists essentially of, or consists of the sequence set forth in SEQ ID NO: 795.

[0416] In some embodiments, a stuffer sequence can be used to increase the time between when RNA polymerase transcribes the polyA to the time when it transcribes the next splice acceptor. For example, the stuffer sequence can be used between two different polyadenylation signals (e.g., between a BGH polyadenylation signal and a synthetic polyadenylation signal. For example, the stuffer sequence can comprise, consist essentially of, or consist of SEQ ID NO: 754.

[0417] In some embodiments, MAZ elements that cause polymerase pausing are used in combination with a polyadenylation signal (e.g., a BGH polyadenylation signal or an SV40 polyadenylation signal). For example, one or more (e.g., at least 1, at least 2, at least 3, at least 4, or about 1 to about 4, about 2 to about 4, about 3 to about 4, or 1, 2, 3, or 4) MAZ elements can be used in combination with a polyadenylation signal. For example, the MAZ element can comprise, consist essentially of, or consist of SEQ ID NO: 755.

[0418] Methods of designing a suitable polyadenylation tail sequence are known. For example, some nucleic acid constructs comprise a polyadenylation tail sequence and/or a polyadenylation signal sequence downstream of an open reading frame (i.e., a polyadenylation tail sequence and/or a polyadenylation signal sequence 3′ of a coding sequence). The polyadenylation tail sequence can be encoded, for example, as a “poly-A” stretch downstream of the multidomain therapeutic protein coding sequence (or other protein coding sequence) in the first and/or second segment. A poly-A tail can comprise, for example, at least 20, 30, 40, 50, 60, 70, 80, 90, or 100 adenines, and optionally up to 300 adenines. In a specific example, the poly-A tail comprises 95, 96, 97, 98, 99, or 100 adenine nucleotides. Methods of designing a suitable polyadenylation tail sequence and/or polyadenylation signal sequence are well known. For example, the polyadenylation signal sequence AAUAAA is commonly used in mammalian systems, although variants such as UAUAAA or AU/GUAAA have been identified. See, e.g., Proudfoot (2011) Genes & Dev. 25(17):1770-82, herein incorporated by reference in its entirety for all purposes.

[0419] The nucleic acid constructs can, in some cases, comprise one or more splice acceptor sites. Some nucleic acid constructs comprise a splice acceptor site located 5′ of the multidomain therapeutic protein coding sequence. In a specific example, the splice acceptor is a mouse Alb exon 2 splice acceptor. In a specific example, the splice acceptor can comprise, consist essentially of, or consist of SEQ ID NO: 163.

[0420] The splice acceptor site can, for example, comprise NAG or consist of NAG. In a specific example, the splice acceptor is an ALB splice acceptor (e.g., an ALB splice acceptor used in the splicing together of exons 1 and 2 of ALB (i.e., ALB exon 2 splice acceptor)). For example, such a splice acceptor can be derived from the human ALB gene. In another example, the splice acceptor can be derived from the mouse Alb gene (e.g., an ALB splice acceptor used in the splicing together of exons 1 and 2 of mouse Alb (i.e., mouse Alb exon 2 splice acceptor)). In another example, the splice acceptor is a GAA splice acceptor. For example, such a splice acceptor can be derived from the human GAA gene. Alternatively, such a splice acceptor can be derived from the mouse GAA gene. Additional suitable splice acceptor sites useful in eukaryotes, including artificial splice acceptors, are known. See, e.g., Shapiro et al. (1987) Nucleic Acids Res. 15:7155-7174 and Burset et al. (2001) Nucleic Acids Res. 29:255-259, each of which is herein incorporated by reference in its entirety for all purposes.

[0421] The nucleic acid constructs can be circular or linear. For example, a nucleic acid construct can be linear. The nucleic acid constructs disclosed herein can be DNA or RNA, single-stranded, double-stranded, or partially single-stranded and partially double-stranded. For example, the constructs can be single- or double-stranded DNA. In some embodiments, the nucleic acid can be modified (e.g., using nucleoside analogs), as described herein. In a specific example, the nucleic acid construct is single-stranded (e.g., single-stranded DNA).

[0422] The nucleic acid constructs disclosed herein can be modified on either or both ends to include one or more suitable structural features as needed and/or to confer one or more functional benefit. For example, structural modifications can vary depending on the method(s) used to deliver the constructs disclosed herein to a host cell (e.g., use of viral vector delivery or packaging into lipid nanoparticles for delivery). Such modifications include, for example, terminal structures such as inverted terminal repeats (ITR), hairpin, loops, and other structures such as toroids. For example, the nucleic acid constructs disclosed herein can comprise one, two, or three ITRs or can comprise no more than two ITRs. Various methods of structural modifications are known.

[0423] Similarly, one or both ends of the nucleic acid construct can be protected (e.g., from exonucleolytic degradation) by known methods. For example, one or more dideoxynucleotide residues can be added to the 3′ terminus of a linear molecule and/or self-complementary oligonucleotides can be ligated to one or both ends. See, e.g., Chang et al. (1987) Proc. Natl. Acad. Sci. U.S.A. 84:4959-4963 and Nehls et al. (1996) Science 272:886-889, each of which is herein incorporated by reference in its entirety for all purposes. Additional methods for protecting the constructs from degradation include, but are not limited to, addition of terminal amino group(s) and the use of modified internucleotide linkages such as, for example, phosphorothioates, phosphoramidates, and O-methyl ribose or deoxyribose residues.

[0424] As disclosed in more detail herein, the nucleic acid constructs disclosed herein can be introduced into a cell as part of a vector having additional sequences such as, for example, replication origins, promoters, and genes encoding antibiotic resistance. The nucleic acid constructs can be introduced as a naked nucleic acid, can be introduced as a nucleic acid complexed with an agent such as a liposome, polymer, or poloxamer, or can be delivered by viral vectors (e.g., adenovirus, AAV, herpesvirus, retrovirus, lentivirus).

[0425] The multidomain therapeutic protein coding sequence, the TfR-binding delivery domain or CD63-binding delivery domain coding sequence, and/or the GAA coding sequence in the nucleic acid constructs disclosed herein may include one or more modifications such as codon optimization (e.g., to human codons), depletion of CpG dinucleotides, mutation of cryptic splice sites, addition of one or more glycosylation sites, or any combination thereof. CpG dinucleotides in a construct can limit the therapeutic utility of the construct. First, unmethylated CpG dinucleotides can interact with host toll-like receptor-9 (TLR-9) to stimulate innate, proinflammatory immune responses. Second, once the CpG dinucleotides become methylated, they can result in the suppression of transgene expression coordinated by methyl-CpG binding proteins. Cryptic splice sites are sequences in a pre-messenger RNA that are not normally used as splice sites, but that can be activated, for example, by mutations that either inactivate canonical splice sites or create splice sites where one did not exist before. Accurate splice site selection is critical for successful gene expression, and removal of cryptic splice sites can favor use of the normal or intended splice site.

[0426] In one example, a multidomain therapeutic protein coding sequence, a TfR-binding delivery domain or CD63-binding delivery domain coding sequence, and/or a GAA coding sequence in a nucleic acid construct disclosed herein has one or more cryptic splice sites mutated or removed. In another example, a multidomain therapeutic protein coding sequence, a TfR-binding delivery domain or CD63-binding delivery domain coding sequence, and/or a GAA coding sequence in a nucleic acid construct disclosed herein has all identified cryptic splice sites mutated or removed. In another example, a multidomain therapeutic protein coding sequence, a TfR-binding delivery domain or CD63-binding delivery domain coding sequence, and/or a GAA coding sequence in a nucleic acid construct disclosed herein has one or more CpG dinucleotides removed (i.e., is CpG depleted). In another example, a multidomain therapeutic protein coding sequence, a TfR-binding delivery domain or CD63-binding delivery domain coding sequence, and/or a GAA coding sequence in a nucleic acid construct disclosed herein has all CpG dinucleotides removed. In another example, a multidomain therapeutic protein coding sequence, a TfR-binding delivery domain or CD63-binding delivery domain coding sequence, and/or a GAA coding sequence in a nucleic acid construct disclosed herein is codon optimized (e.g., codon optimized for expression in a human or mammal). In a specific example, a multidomain therapeutic protein coding sequence, a TfR-binding delivery domain or CD63-binding delivery domain coding sequence, and/or a GAA coding sequence in a nucleic acid construct disclosed herein has one or more CpG dinucleotides removed (i.e., is CpG depleted) and has one or more cryptic splice sites mutated or removed. In another specific example, a multidomain therapeutic protein coding sequence, a TfR-binding delivery domain or CD63-binding delivery domain coding sequence, and/or a GAA coding sequence in a nucleic acid construct disclosed herein has all CpG dinucleotides removed and has one or more or all identified cryptic splice sites mutated or removed. In another specific example, a multidomain therapeutic protein coding sequence, a TfR-binding delivery domain or CD63-binding delivery domain coding sequence, and/or a GAA coding sequence in a nucleic acid construct disclosed herein has one or more CpG dinucleotides removed (i.e., is CpG depleted) and is codon optimized (e.g., codon optimized for expression in a human or mammal). In another specific example, a multidomain therapeutic protein coding sequence, a TfR-binding delivery domain or CD63-binding delivery domain coding sequence, and/or a GAA coding sequence in a nucleic acid construct disclosed herein has all CpG dinucleotides removed (i.e., is fully CpG depleted) and is codon optimized (e.g., codon optimized for expression in a human or mammal).

[0427] In an exemplary nucleic acid construct, the construct comprises a polyadenylation signal sequence located 3′ of the multidomain therapeutic protein coding sequence, the construct comprises a splice acceptor site located 5′ of the multidomain therapeutic protein coding sequence, and the nucleic acid construct comprises a promoter that drives expression of the multidomain therapeutic protein.

[0428] In an exemplary nucleic acid construct, the construct comprises a polyadenylation signal sequence located 3′ of the multidomain therapeutic protein coding sequence, and the nucleic acid construct comprises a promoter that drives expression of the multidomain therapeutic protein (e.g., for episomal gene expression).

[0429] In an exemplary nucleic acid construct, the construct comprises a polyadenylation signal sequence located 3′ of the multidomain therapeutic protein coding sequence, the construct comprises a splice acceptor site located 5′ of the multidomain therapeutic protein coding sequence, and the nucleic acid construct does not comprise a promoter that drives expression of the multidomain therapeutic protein, and optionally the nucleic acid construct does not comprise a homology arm.

[0430] In a specific example of a multidomain therapeutic protein nucleic acid construct, the encoded multidomain therapeutic protein can comprise SEQ ID NO: 746 or can be at least 90%, at least 91%, at least 92%, at least 93%, at least 94%, at least 95%, at least 96%, at least 97%, at least 98%, at least 99%, or at least 99.5% identical to SEQ ID NO: 746. In another specific example, the multidomain therapeutic protein can consist essentially of SEQ ID NO: 746. In another specific example, the multidomain therapeutic protein can consist of SEQ ID NO: 746.

[0431] Various multidomain therapeutic protein coding sequences are provided. In one example, the multidomain therapeutic protein coding sequence is (or comprises a sequence) at least 90%, at least 91%, at least 92%, at least 93%, at least 94%, at least 95%, at least 96%, at least 97%, at least 98%, at least 99%, at least 99.5%, or 100% identical to SEQ ID NO: 745 or 671. In another example, the multidomain therapeutic protein coding sequence is (or comprises a sequence) at least 95%, at least 96%, at least 97%, at least 98%, at least 99%, at least 99.5%, or 100% identical to SEQ ID NO: 745 or 671. In another example, the multidomain therapeutic protein coding sequence is (or comprises a sequence) at least 99%, at least 99.5%, or 100% identical to SEQ ID NO: 745 or 671. In another example, the multidomain therapeutic protein coding sequence comprises the sequence set forth in SEQ ID NO: 745 or 671. In another example, the multidomain therapeutic protein coding sequence consists essentially of the sequence set forth in SEQ ID NO: 745 or 671. In another example, the multidomain therapeutic protein coding sequence consists of the sequence set forth in SEQ ID NO: 745 or 671. Optionally, the multidomain therapeutic protein coding sequence encodes a multidomain therapeutic protein (or a multidomain therapeutic protein comprising a sequence) at least 90%, at least 91%, at least 92%, at least 93%, at least 94%, at least 95%, at least 96%, at least 97%, at least 98%, at least 99%, at least 99.5%, or 100% identical to SEQ ID NO: 746 (and, e.g., retaining the activity of native GAA). Optionally, the multidomain therapeutic protein coding sequence encodes a multidomain therapeutic protein (or a multidomain therapeutic protein comprising a sequence) at least 95%, at least 96%, at least 97%, at least 98%, at least 99%, at least 99.5%, or 100% identical to SEQ ID NO: 746 (and, e.g., retaining the activity of native GAA). Optionally, the multidomain therapeutic protein coding sequence in the above examples encodes a multidomain therapeutic protein (or a multidomain therapeutic protein comprising a sequence) at least 99%, at least 99.5%, or 100% identical to SEQ ID NO: 746 (and, e.g., retaining the activity of native GAA). Optionally, the multidomain therapeutic protein coding sequence in the above examples encodes a multidomain therapeutic protein comprising the sequence set forth in SEQ ID NO: 746. Optionally, the multidomain therapeutic protein coding sequence in the above examples encodes a multidomain therapeutic protein consisting essentially of the sequence set forth in SEQ ID NO: 746. Optionally, the multidomain therapeutic protein coding sequence in the above examples encodes a multidomain therapeutic protein consisting of the sequence set forth in SEQ ID NO: 746. In some embodiments, the nucleotide at position 1857 is a “G.” In some embodiments, the nucleotide at position 1860 is a “C.” In some embodiments, the nucleotide at position 3105 is a “G.” In some embodiments, the nucleotide at position 1857 is a “G,” the nucleotide at position 1860 is a “C,” and the nucleotide at position 3105 is a “G.”

[0432] Various multidomain therapeutic protein coding sequences are provided. In one example, the multidomain therapeutic protein coding sequence is (or comprises a sequence) at least 90%, at least 91%, at least 92%, at least 93%, at least 94%, at least 95%, at least 96%, at least 97%, at least 98%, at least 99%, at least 99.5%, or 100% identical to SEQ ID NO: 745. In another example, the multidomain therapeutic protein coding sequence is (or comprises a sequence) at least 95%, at least 96%, at least 97%, at least 98%, at least 99%, at least 99.5%, or 100% identical to SEQ ID NO: 745. In another example, the multidomain therapeutic protein coding sequence is (or comprises a sequence) at least 99%, at least 99.5%, or 100% identical to SEQ ID NO: 745. In another example, the multidomain therapeutic protein coding sequence comprises the sequence set forth in SEQ ID NO: 745. In another example, the multidomain therapeutic protein coding sequence consists essentially of the sequence set forth in SEQ ID NO: 745. In another example, the multidomain therapeutic protein coding sequence consists of the sequence set forth in SEQ ID NO: 745. Optionally, the multidomain therapeutic protein coding sequence encodes a multidomain therapeutic protein (or a multidomain therapeutic protein comprising a sequence) at least 90%, at least 91%, at least 92%, at least 93%, at least 94%, at least 95%, at least 96%, at least 97%, at least 98%, at least 99%, at least 99.5%, or 100% identical to SEQ ID NO: 746 (and, e.g., retaining the activity of native GAA). Optionally, the multidomain therapeutic protein coding sequence encodes a multidomain therapeutic protein (or a multidomain therapeutic protein comprising a sequence) at least 95%, at least 96%, at least 97%, at least 98%, at least 99%, at least 99.5%, or 100% identical to SEQ ID NO: 746 (and, e.g., retaining the activity of native GAA). Optionally, the multidomain therapeutic protein coding sequence in the above examples encodes a multidomain therapeutic protein (or a multidomain therapeutic protein comprising a sequence) at least 99%, at least 99.5%, or 100% identical to SEQ ID NO: 746 (and, e.g., retaining the activity of native GAA). Optionally, the multidomain therapeutic protein coding sequence in the above examples encodes a multidomain therapeutic protein comprising the sequence set forth in SEQ ID NO: 746. Optionally, the multidomain therapeutic protein coding sequence in the above examples encodes a multidomain therapeutic protein consisting essentially of the sequence set forth in SEQ ID NO: 746. Optionally, the multidomain therapeutic protein coding sequence in the above examples encodes a multidomain therapeutic protein consisting of the sequence set forth in SEQ ID NO: 746. In some embodiments, the nucleotide at position 1857 is a “G.” In some embodiments, the nucleotide at position 1860 is a “C.” In some embodiments, the nucleotide at position 3105 is a “G.” In some embodiments, the nucleotide at position 1857 is a “G,” the nucleotide at position 1860 is a “C,” and the nucleotide at position 3105 is a “G.”

[0433] The nucleic acid construct can comprise, for example, (1) a 5′ ITR (e.g., such as the one set forth in SEQ ID NO: 160), (2) a splice acceptor site (e.g., a mouse Alb exon 2 splice acceptor, such as the one set forth in SEQ ID NO: 163), (3) the multidomain therapeutic protein coding sequence, (4) a polyadenylation signal (e.g., a BGH polyadenylation signal, such as the one set forth in SEQ ID NO: 751, or a combination of a BGH polyadenylation signal and a unidirectional SV40 late polyadenylation signal, such as the ones set forth in SEQ ID NOS: 751 and 752, respectively), and (5) a 3′ ITR (e.g., such as the one set forth in SEQ ID NO: 160 or the reverse complement thereof). In one example, the nucleic acid construct comprises a sequence at least 90%, at least 91%, at least 92%, at least 93%, at least 94%, at least 95%, at least 96%, at least 97%, at least 98%, at least 99%, at least 99.5%, or 100% identical to SEQ ID NO: 764, 765, 780, or 781. In another example, the nucleic acid construct comprises a sequence at least 90%, at least 91%, at least 92%, at least 93%, at least 94%, at least 95%, at least 96%, at least 97%, at least 98%, at least 99%, at least 99.5%, or 100% identical to SEQ ID NO: 764, 765, 780, or 781 and encodes a multidomain therapeutic protein (or a multidomain therapeutic protein comprising a sequence) at least 99%, at least 99.5%, or 100% identical to SEQ ID NO: 746. In another example, the nucleic acid construct comprises a sequence at least 90%, at least 91%, at least 92%, at least 93%, at least 94%, at least 95%, at least 96%, at least 97%, at least 98%, at least 99%, at least 99.5%, or 100% identical to SEQ ID NO: 764, 765, 780, or 781 and encodes a multidomain therapeutic protein comprising the sequence set forth in SEQ ID NO: 746. In another example, the nucleic acid construct comprises a sequence at least 95%, at least 96%, at least 97%, at least 98%, at least 99%, at least 99.5%, or 100% identical to SEQ ID NO: 764, 765, 780, or 781. In another example, the nucleic acid construct comprises a sequence at least 95%, at least 96%, at least 97%, at least 98%, at least 99%, at least 99.5%, or 100% identical to SEQ ID NO: 764, 765, 780, or 781 and encodes a multidomain therapeutic protein (or a multidomain therapeutic protein comprising a sequence) at least 99%, at least 99.5%, or 100% identical to SEQ ID NO: 746. In another example, the nucleic acid construct comprises a sequence at least 95%, at least 96%, at least 97%, at least 98%, at least 99%, at least 99.5%, or 100% identical to SEQ ID NO: 764, 765, 780, or 781 and encodes a multidomain therapeutic protein comprising the sequence set forth in SEQ ID NO: 746. In another example, the nucleic acid construct comprises a sequence at least 99%, at least 99.5%, or 100% identical to SEQ ID NO: 764, 765, 780, or 781. In another example, the nucleic acid construct comprises a sequence at least 99%, at least 99.5%, or 100% identical to SEQ ID NO: 764, 765, 780, or 781 and encodes a multidomain therapeutic protein (or a multidomain therapeutic protein comprising a sequence) at least 99%, at least 99.5%, or 100% identical to SEQ ID NO: 746. In another example, the nucleic acid construct comprises a sequence at least 99%, at least 99.5%, or 100% identical to SEQ ID NO: 764, 765, 780, or 781 and encodes a multidomain therapeutic protein comprising the sequence set forth in SEQ ID NO: 746. In another example, the nucleic acid construct comprises the sequence set forth in SEQ ID NO: 764, 765, 780, or 781. The multidomain therapeutic protein coding sequence can be, for example, CpG-depleted (e.g., fully CpG-depleted) and/or codon optimized. For example, the multidomain therapeutic protein coding sequence can be CpG depleted (e.g., fully CpG-depleted) and codon optimized. Optionally, the nucleic acid construct encodes a multidomain therapeutic protein (or a multidomain therapeutic protein comprising a sequence) at least 90%, at least 91%, at least 92%, at least 93%, at least 94%, at least 95%, at least 96%, at least 97%, at least 98%, at least 99%, at least 99.5%, or 100% identical to SEQ ID NO: 746 (and, e.g., retaining the activity of native GAA). Optionally, the nucleic acid construct encodes a multidomain therapeutic protein (or a multidomain therapeutic protein comprising a sequence) at least 95%, at least 96%, at least 97%, at least 98%, at least 99%, at least 99.5%, or 100% identical to SEQ ID NO: 746 (and, e.g., retaining the activity of native GAA). Optionally, the nucleic acid construct in the above examples encodes a multidomain therapeutic protein (or a multidomain therapeutic protein comprising a sequence) at least 99%, at least 99.5%, or 100% identical to SEQ ID NO: 746 (and, e.g., retaining the activity of native GAA). Optionally, the nucleic acid construct in the above examples encodes a multidomain therapeutic protein comprising the sequence set forth in SEQ ID NO: 746. Optionally, the nucleic acid construct in the above examples encodes a multidomain therapeutic protein consisting essentially of the sequence set forth in SEQ ID NO: 746. Optionally, the nucleic acid construct in the above examples encodes a multidomain therapeutic protein consisting of the sequence set forth in SEQ ID NO: 746.

[0434] The nucleic acid construct can comprise, for example, (1) a 5′ ITR (e.g., such as the one set forth in SEQ ID NO: 160), (2) a splice acceptor site (e.g., a mouse Alb exon 2 splice acceptor, such as the one set forth in SEQ ID NO: 163), (3) the multidomain therapeutic protein coding sequence, (4) a polyadenylation signal (e.g., a BGH polyadenylation signal, such as the one set forth in SEQ ID NO: 751, or a combination of a BGH polyadenylation signal and a unidirectional SV40 late polyadenylation signal, such as the ones set forth in SEQ ID NOS: 751 and 752, respectively), and (5) a 3′ ITR (e.g., such as the one set forth in SEQ ID NO: 160 or the reverse complement thereof). In one example, the nucleic acid construct comprises a sequence at least 90%, at least 91%, at least 92%, at least 93%, at least 94%, at least 95%, at least 96%, at least 97%, at least 98%, at least 99%, at least 99.5%, or 100% identical to SEQ ID NO: 764 or 780. In another example, the nucleic acid construct comprises a sequence at least 90%, at least 91%, at least 92%, at least 93%, at least 94%, at least 95%, at least 96%, at least 97%, at least 98%, at least 99%, at least 99.5%, or 100% identical to SEQ ID NO: 764 or 780 and encodes a multidomain therapeutic protein (or a multidomain therapeutic protein comprising a sequence) at least 99%, at least 99.5%, or 100% identical to SEQ ID NO: 746. In another example, the nucleic acid construct comprises a sequence at least 90%, at least 91%, at least 92%, at least 93%, at least 94%, at least 95%, at least 96%, at least 97%, at least 98%, at least 99%, at least 99.5%, or 100% identical to SEQ ID NO: 764 or 780 and encodes a multidomain therapeutic protein comprising the sequence set forth in SEQ ID NO: 746. In another example, the nucleic acid construct comprises a sequence at least 95%, at least 96%, at least 97%, at least 98%, at least 99%, at least 99.5%, or 100% identical to SEQ ID NO: 764 or 780. In another example, the nucleic acid construct comprises a sequence at least 95%, at least 96%, at least 97%, at least 98%, at least 99%, at least 99.5%, or 100% identical to SEQ ID NO: 764 or 780 and encodes a multidomain therapeutic protein (or a multidomain therapeutic protein comprising a sequence) at least 99%, at least 99.5%, or 100% identical to SEQ ID NO: 746. In another example, the nucleic acid construct comprises a sequence at least 95%, at least 96%, at least 97%, at least 98%, at least 99%, at least 99.5%, or 100% identical to SEQ ID NO: 764 or 780 and encodes a multidomain therapeutic protein comprising the sequence set forth in SEQ ID NO: 746. In another example, the nucleic acid construct comprises a sequence at least 99%, at least 99.5%, or 100% identical to SEQ ID NO: 764 or 780. In another example, the nucleic acid construct comprises a sequence at least 99%, at least 99.5%, or 100% identical to SEQ ID NO: 764 or 780 and encodes a multidomain therapeutic protein (or a multidomain therapeutic protein comprising a sequence) at least 99%, at least 99.5%, or 100% identical to SEQ ID NO: 746. In another example, the nucleic acid construct comprises a sequence at least 99%, at least 99.5%, or 100% identical to SEQ ID NO: 764 or 780 and encodes a multidomain therapeutic protein comprising the sequence set forth in SEQ ID NO: 746. In another example, the nucleic acid construct comprises the sequence set forth in SEQ ID NO: 764 or 780. The multidomain therapeutic protein coding sequence can be, for example, CpG-depleted (e.g., fully CpG-depleted) and/or codon optimized. For example, the multidomain therapeutic protein coding sequence can be CpG depleted (e.g., fully CpG-depleted) and codon optimized. Optionally, the nucleic acid construct encodes a multidomain therapeutic protein (or a multidomain therapeutic protein comprising a sequence) at least 90%, at least 91%, at least 92%, at least 93%, at least 94%, at least 95%, at least 96%, at least 97%, at least 98%, at least 99%, at least 99.5%, or 100% identical to SEQ ID NO: 746 (and, e.g., retaining the activity of native GAA). Optionally, the nucleic acid construct encodes a multidomain therapeutic protein (or a multidomain therapeutic protein comprising a sequence) at least 95%, at least 96%, at least 97%, at least 98%, at least 99%, at least 99.5%, or 100% identical to SEQ ID NO: 746 (and, e.g., retaining the activity of native GAA). Optionally, the nucleic acid construct in the above examples encodes a multidomain therapeutic protein (or a multidomain therapeutic protein comprising a sequence) at least 99%, at least 99.5%, or 100% identical to SEQ ID NO: 746 (and, e.g., retaining the activity of native GAA). Optionally, the nucleic acid construct in the above examples encodes a multidomain therapeutic protein comprising the sequence set forth in SEQ ID NO: 746. Optionally, the nucleic acid construct in the above examples encodes a multidomain therapeutic protein consisting essentially of the sequence set forth in SEQ ID NO: 746. Optionally, the nucleic acid construct in the above examples encodes a multidomain therapeutic protein consisting of the sequence set forth in SEQ ID NO: 746.

[0435] In a specific example of a multidomain therapeutic protein nucleic acid construct, the encoded multidomain therapeutic protein can comprise SEQ ID NO: 733 or can be at least 90%, at least 91%, at least 92%, at least 93%, at least 94%, at least 95%, at least 96%, at least 97%, at least 98%, at least 99%, or at least 99.5% identical to SEQ ID NO: 733. In another specific example, the multidomain therapeutic protein can consist essentially of SEQ ID NO: 733. In another specific example, the multidomain therapeutic protein can consist of SEQ ID NO: 733.

[0436] Various multidomain therapeutic protein coding sequences are provided. In one example, the multidomain therapeutic protein coding sequence is (or comprises a sequence) at least 90%, at least 91%, at least 92%, at least 93%, at least 94%, at least 95%, at least 96%, at least 97%, at least 98%, at least 99%, at least 99.5%, or 100% identical to any one of SEQ ID NOS: 756, 757, 758, and 736. In another example, the multidomain therapeutic protein coding sequence is (or comprises a sequence) at least 95%, at least 96%, at least 97%, at least 98%, at least 99%, at least 99.5%, or 100% identical to any one of SEQ ID NOS: 756, 757, 758, and 736. In another example, the multidomain therapeutic protein coding sequence is (or comprises a sequence) at least 99%, at least 99.5%, or 100% identical to any one of SEQ ID NOS: 756, 757, 758, and 736. In another example, the multidomain therapeutic protein coding sequence comprises the sequence set forth in any one of SEQ ID NOS: 756, 757, 758, and 736. In another example, the multidomain therapeutic protein coding sequence consists essentially of the sequence set forth in any one of SEQ ID NOS: 756, 757, 758, and 736. In another example, the multidomain therapeutic protein coding sequence consists of the sequence set forth in any one of SEQ ID NOS: 756, 757, 758, and 736. Optionally, the multidomain therapeutic protein coding sequence encodes a multidomain therapeutic protein (or a multidomain therapeutic protein comprising a sequence) at least 90%, at least 91%, at least 92%, at least 93%, at least 94%, at least 95%, at least 96%, at least 97%, at least 98%, at least 99%, at least 99.5%, or 100% identical to SEQ ID NO: 733 (and, e.g., retaining the activity of native GAA). Optionally, the multidomain therapeutic protein coding sequence encodes a multidomain therapeutic protein (or a multidomain therapeutic protein comprising a sequence) at least 95%, at least 96%, at least 97%, at least 98%, at least 99%, at least 99.5%, or 100% identical to SEQ ID NO: 733 (and, e.g., retaining the activity of native GAA). Optionally, the multidomain therapeutic protein coding sequence in the above examples encodes a multidomain therapeutic protein (or a multidomain therapeutic protein comprising a sequence) at least 99%, at least 99.5%, or 100% identical to SEQ ID NO: 733 (and, e.g., retaining the activity of native GAA). Optionally, the multidomain therapeutic protein coding sequence in the above examples encodes a multidomain therapeutic protein comprising the sequence set forth in SEQ ID NO: 733. Optionally, the multidomain therapeutic protein coding sequence in the above examples encodes a multidomain therapeutic protein consisting essentially of the sequence set forth in SEQ ID NO: 733. Optionally, the multidomain therapeutic protein coding sequence in the above examples encodes a multidomain therapeutic protein consisting of the sequence set forth in SEQ ID NO: 733. In some embodiments, the nucleotide at position 3 is an “A.” In some embodiments, the nucleotide at position 132 is an “A.” In some embodiments, the nucleotide at position 273 is a “T.” In some embodiments, the nucleotide at position 723 is a “G.” In some embodiments, the nucleotide at position 1830 is a “G.” In some embodiments, the nucleotide at position 1833 is a “C.” In some embodiments, the nucleotide at position 3078 is a “G.” In some embodiments, the nucleotide at position 3 is an “A,” the nucleotide at position 132 is an “A,” the nucleotide at position 273 is a “T,” the nucleotide at position 723 is a “G,” the nucleotide at position 1830 is a “G,” the nucleotide at position 1833 is a “C,” and the nucleotide at position 3078 is a “G.” In some embodiments, the nucleotide at position 273 is a “T,” the nucleotide at position 723 is a “G,” the nucleotide at position 1830 is a “G,” the nucleotide at position 1833 is a “C,” and the nucleotide at position 3078 is a “G.” In some embodiments, the nucleotide at position 1830 is a “G,” the nucleotide at position 1833 is a “C,” and the nucleotide at position 3078 is a “G.”

[0437] Various multidomain therapeutic protein coding sequences are provided. In one example, the multidomain therapeutic protein coding sequence is (or comprises a sequence) at least 90%, at least 91%, at least 92%, at least 93%, at least 94%, at least 95%, at least 96%, at least 97%, at least 98%, at least 99%, at least 99.5%, or 100% identical to SEQ ID NO: 756. In another example, the multidomain therapeutic protein coding sequence is (or comprises a sequence) at least 95%, at least 96%, at least 97%, at least 98%, at least 99%, at least 99.5%, or 100% identical to SEQ ID NO: 756. In another example, the multidomain therapeutic protein coding sequence is (or comprises a sequence) at least 99%, at least 99.5%, or 100% identical to SEQ ID NO: 756. In another example, the multidomain therapeutic protein coding sequence comprises the sequence set forth in SEQ ID NO: 756. In another example, the multidomain therapeutic protein coding sequence consists essentially of the sequence set forth in SEQ ID NO: 756. In another example, the multidomain therapeutic protein coding sequence consists of the sequence set forth in SEQ ID NO: 756. Optionally, the multidomain therapeutic protein coding sequence encodes a multidomain therapeutic protein (or a multidomain therapeutic protein comprising a sequence) at least 90%, at least 91%, at least 92%, at least 93%, at least 94%, at least 95%, at least 96%, at least 97%, at least 98%, at least 99%, at least 99.5%, or 100% identical to SEQ ID NO: 733 (and, e.g., retaining the activity of native GAA). Optionally, the multidomain therapeutic protein coding sequence encodes a multidomain therapeutic protein (or a multidomain therapeutic protein comprising a sequence) at least 95%, at least 96%, at least 97%, at least 98%, at least 99%, at least 99.5%, or 100% identical to SEQ ID NO: 733 (and, e.g., retaining the activity of native GAA). Optionally, the multidomain therapeutic protein coding sequence in the above examples encodes a multidomain therapeutic protein (or a multidomain therapeutic protein comprising a sequence) at least 99%, at least 99.5%, or 100% identical to SEQ ID NO: 733 (and, e.g., retaining the activity of native GAA). Optionally, the multidomain therapeutic protein coding sequence in the above examples encodes a multidomain therapeutic protein comprising the sequence set forth in SEQ ID NO: 733. Optionally, the multidomain therapeutic protein coding sequence in the above examples encodes a multidomain therapeutic protein consisting essentially of the sequence set forth in SEQ ID NO: 733. Optionally, the multidomain therapeutic protein coding sequence in the above examples encodes a multidomain therapeutic protein consisting of the sequence set forth in SEQ ID NO: 733. In some embodiments, the nucleotide at position 3 is an “A.” In some embodiments, the nucleotide at position 132 is an “A.” In some embodiments, the nucleotide at position 273 is a “T.” In some embodiments, the nucleotide at position 723 is a “G.” In some embodiments, the nucleotide at position 1830 is a “G.” In some embodiments, the nucleotide at position 1833 is a “C.” In some embodiments, the nucleotide at position 3078 is a “G.” In some embodiments, the nucleotide at position 3 is an “A,” the nucleotide at position 132 is an “A,” the nucleotide at position 273 is a “T,” the nucleotide at position 723 is a “G,” the nucleotide at position 1830 is a “G,” the nucleotide at position 1833 is a “C,” and the nucleotide at position 3078 is a “G.” In some embodiments, the nucleotide at position 273 is a “T,” the nucleotide at position 723 is a “G,” the nucleotide at position 1830 is a “G,” the nucleotide at position 1833 is a “C,” and the nucleotide at position 3078 is a “G.” In some embodiments, the nucleotide at position 1830 is a “G,” the nucleotide at position 1833 is a “C,” and the nucleotide at position 3078 is a “G.”

[0438] The nucleic acid construct can comprise, for example, (1) a 5′ ITR (e.g., such as the one set forth in SEQ ID NO: 160), (2) a splice acceptor site (e.g., a mouse Alb exon 2 splice acceptor, such as the one set forth in SEQ ID NO: 163), (3) the multidomain therapeutic protein coding sequence, (4) a polyadenylation signal (e.g., a BGH polyadenylation signal, such as the one set forth in SEQ ID NO: 751, or a combination of a BGH polyadenylation signal and a unidirectional SV40 late polyadenylation signal, such as the ones set forth in SEQ ID NOS: 751 and 752, respectively), and (5) a 3′ ITR (e.g., such as the one set forth in SEQ ID NO: 160 or the reverse complement thereof). In one example, the nucleic acid construct comprises a sequence at least 90%, at least 91%, at least 92%, at least 93%, at least 94%, at least 95%, at least 96%, at least 97%, at least 98%, at least 99%, at least 99.5%, or 100% identical to SEQ ID NO: 777, 778, 793, or 794. In another example, the nucleic acid construct comprises a sequence at least 90%, at least 91%, at least 92%, at least 93%, at least 94%, at least 95%, at least 96%, at least 97%, at least 98%, at least 99%, at least 99.5%, or 100% identical to SEQ ID NO: 777, 778, 793, or 794 and encodes a multidomain therapeutic protein (or a multidomain therapeutic protein comprising a sequence) at least 99%, at least 99.5%, or 100% identical to SEQ ID NO: 733. In another example, the nucleic acid construct comprises a sequence at least 90%, at least 91%, at least 92%, at least 93%, at least 94%, at least 95%, at least 96%, at least 97%, at least 98%, at least 99%, at least 99.5%, or 100% identical to SEQ ID NO: 777, 778, 793, or 794 and encodes a multidomain therapeutic protein comprising the sequence set forth in SEQ ID NO: 733. In another example, the nucleic acid construct comprises a sequence at least 95%, at least 96%, at least 97%, at least 98%, at least 99%, at least 99.5%, or 100% identical to SEQ ID NO: 777, 778, 793, or 794. In another example, the nucleic acid construct comprises a sequence at least 95%, at least 96%, at least 97%, at least 98%, at least 99%, at least 99.5%, or 100% identical to SEQ ID NO: 777, 778, 793, or 794 and encodes a multidomain therapeutic protein (or a multidomain therapeutic protein comprising a sequence) at least 99%, at least 99.5%, or 100% identical to SEQ ID NO: 733. In another example, the nucleic acid construct comprises a sequence at least 95%, at least 96%, at least 97%, at least 98%, at least 99%, at least 99.5%, or 100% identical to SEQ ID NO: 777, 778, 793, or 794 and encodes a multidomain therapeutic protein comprising the sequence set forth in SEQ ID NO: 733. In another example, the nucleic acid construct comprises a sequence at least 99%, at least 99.5%, or 100% identical to SEQ ID NO: 777, 778, 793, or 794. In another example, the nucleic acid construct comprises a sequence at least 99%, at least 99.5%, or 100% identical to SEQ ID NO: 777, 778, 793, or 794 and encodes a multidomain therapeutic protein (or a multidomain therapeutic protein comprising a sequence) at least 99%, at least 99.5%, or 100% identical to SEQ ID NO: 733. In another example, the nucleic acid construct comprises a sequence at least 99%, at least 99.5%, or 100% identical to SEQ ID NO: 777, 778, 793, or 794 and encodes a multidomain therapeutic protein comprising the sequence set forth in SEQ ID NO: 733. In another example, the nucleic acid construct comprises the sequence set forth in SEQ ID NO: 777, 778, 793, or 794. The multidomain therapeutic protein coding sequence can be, for example, CpG-depleted (e.g., fully CpG-depleted) and/or codon optimized. For example, the multidomain therapeutic protein coding sequence can be CpG depleted (e.g., fully CpG-depleted) and codon optimized. Optionally, the nucleic acid construct encodes a multidomain therapeutic protein (or a multidomain therapeutic protein comprising a sequence) at least 90%, at least 91%, at least 92%, at least 93%, at least 94%, at least 95%, at least 96%, at least 97%, at least 98%, at least 99%, at least 99.5%, or 100% identical to SEQ ID NO: 733 (and, e.g., retaining the activity of native GAA). Optionally, the nucleic acid construct encodes a multidomain therapeutic protein (or a multidomain therapeutic protein comprising a sequence) at least 95%, at least 96%, at least 97%, at least 98%, at least 99%, at least 99.5%, or 100% identical to SEQ ID NO: 733 (and, e.g., retaining the activity of native GAA). Optionally, the nucleic acid construct in the above examples encodes a multidomain therapeutic protein (or a multidomain therapeutic protein comprising a sequence) at least 99%, at least 99.5%, or 100% identical to SEQ ID NO: 733 (and, e.g., retaining the activity of native GAA). Optionally, the nucleic acid construct in the above examples encodes a multidomain therapeutic protein comprising the sequence set forth in SEQ ID NO: 733. Optionally, the nucleic acid construct in the above examples encodes a multidomain therapeutic protein consisting essentially of the sequence set forth in SEQ ID NO: 733. Optionally, the nucleic acid construct in the above examples encodes a multidomain therapeutic protein consisting of the sequence set forth in SEQ ID NO: 733.

[0439] The nucleic acid construct can comprise, for example, (1) a 5′ ITR (e.g., such as the one set forth in SEQ ID NO: 160), (2) a splice acceptor site (e.g., a mouse Alb exon 2 splice acceptor, such as the one set forth in SEQ ID NO: 163), (3) the multidomain therapeutic protein coding sequence, (4) a polyadenylation signal (e.g., a BGH polyadenylation signal, such as the one set forth in SEQ ID NO: 751, or a combination of a BGH polyadenylation signal and a unidirectional SV40 late polyadenylation signal, such as the ones set forth in SEQ ID NOS: 751 and 752, respectively), and (5) a 3′ ITR (e.g., such as the one set forth in SEQ ID NO: 160 or the reverse complement thereof). In one example, the nucleic acid construct comprises a sequence at least 90%, at least 91%, at least 92%, at least 93%, at least 94%, at least 95%, at least 96%, at least 97%, at least 98%, at least 99%, at least 99.5%, or 100% identical to SEQ ID NO: 777 or 793. In another example, the nucleic acid construct comprises a sequence at least 90%, at least 91%, at least 92%, at least 93%, at least 94%, at least 95%, at least 96%, at least 97%, at least 98%, at least 99%, at least 99.5%, or 100% identical to SEQ ID NO: 777 or 793 and encodes a multidomain therapeutic protein (or a multidomain therapeutic protein comprising a sequence) at least 99%, at least 99.5%, or 100% identical to SEQ ID NO: 733. In another example, the nucleic acid construct comprises a sequence at least 90%, at least 91%, at least 92%, at least 93%, at least 94%, at least 95%, at least 96%, at least 97%, at least 98%, at least 99%, at least 99.5%, or 100% identical to SEQ ID NO: 777 or 793 and encodes a multidomain therapeutic protein comprising the sequence set forth in SEQ ID NO: 733. In another example, the nucleic acid construct comprises a sequence at least 95%, at least 96%, at least 97%, at least 98%, at least 99%, at least 99.5%, or 100% identical to SEQ ID NO: 777 or 793. In another example, the nucleic acid construct comprises a sequence at least 95%, at least 96%, at least 97%, at least 98%, at least 99%, at least 99.5%, or 100% identical to SEQ ID NO: 777 or 793 and encodes a multidomain therapeutic protein (or a multidomain therapeutic protein comprising a sequence) at least 99%, at least 99.5%, or 100% identical to SEQ ID NO: 733. In another example, the nucleic acid construct comprises a sequence at least 95%, at least 96%, at least 97%, at least 98%, at least 99%, at least 99.5%, or 100% identical to SEQ ID NO: 777 or 793 and encodes a multidomain therapeutic protein comprising the sequence set forth in SEQ ID NO: 733. In another example, the nucleic acid construct comprises a sequence at least 99%, at least 99.5%, or 100% identical to SEQ ID NO: 777 or 793. In another example, the nucleic acid construct comprises a sequence at least 99%, at least 99.5%, or 100% identical to SEQ ID NO: 777 or 793 and encodes a multidomain therapeutic protein (or a multidomain therapeutic protein comprising a sequence) at least 99%, at least 99.5%, or 100% identical to SEQ ID NO: 733. In another example, the nucleic acid construct comprises a sequence at least 99%, at least 99.5%, or 100% identical to SEQ ID NO: 777 or 793 and encodes a multidomain therapeutic protein comprising the sequence set forth in SEQ ID NO: 733. In another example, the nucleic acid construct comprises the sequence set forth in SEQ ID NO: 777 or 793. The multidomain therapeutic protein coding sequence can be, for example, CpG-depleted (e.g., fully CpG-depleted) and/or codon optimized. For example, the multidomain therapeutic protein coding sequence can be CpG depleted (e.g., fully CpG-depleted) and codon optimized. Optionally, the nucleic acid construct encodes a multidomain therapeutic protein (or a multidomain therapeutic protein comprising a sequence) at least 90%, at least 91%, at least 92%, at least 93%, at least 94%, at least 95%, at least 96%, at least 97%, at least 98%, at least 99%, at least 99.5%, or 100% identical to SEQ ID NO: 733 (and, e.g., retaining the activity of native GAA). Optionally, the nucleic acid construct encodes a multidomain therapeutic protein (or a multidomain therapeutic protein comprising a sequence) at least 95%, at least 96%, at least 97%, at least 98%, at least 99%, at least 99.5%, or 100% identical to SEQ ID NO: 733 (and, e.g., retaining the activity of native GAA). Optionally, the nucleic acid construct in the above examples encodes a multidomain therapeutic protein (or a multidomain therapeutic protein comprising a sequence) at least 99%, at least 99.5%, or 100% identical to SEQ ID NO: 733 (and, e.g., retaining the activity of native GAA). Optionally, the nucleic acid construct in the above examples encodes a multidomain therapeutic protein comprising the sequence set forth in SEQ ID NO: 733. Optionally, the nucleic acid construct in the above examples encodes a multidomain therapeutic protein consisting essentially of the sequence set forth in SEQ ID NO: 733. Optionally, the nucleic acid construct in the above examples encodes a multidomain therapeutic protein consisting of the sequence set forth in SEQ ID NO: 733.

[0440] When specific multidomain therapeutic protein nucleic acid constructs sequences are disclosed herein, they are meant to encompass the sequence disclosed or the reverse complement of the sequence. For example, if a multidomain therapeutic protein nucleic acid construct disclosed herein consists of the hypothetical sequence 5′-CTGGACCGA-3′, it is also meant to encompass the reverse complement of that sequence (5′-TCGGTCCAG-3′). Likewise, when construct elements are disclosed herein in a specific 5′ to 3′ order, they are also meant to encompass the reverse complement of the order of those elements. One reason for this is that, in many embodiments disclosed herein, the multidomain therapeutic protein nucleic acid constructs are part of a single-stranded recombinant AAV vector. Single-stranded AAV genomes are packaged as either sense (plus-stranded) or anti-sense (minus-stranded genomes), and single-stranded AAV genomes of + and − polarity are packaged with equal frequency into mature rAAV virions. See, e.g., LING et al. (2015) J. Mol. Genet. Med. 9(3):175, Zhou et al. (2008) Mol. Ther. 16(3):494-499, and Samulski et al. (1987) J. Virol. 61:3096-3101, each of which is herein incorporated by reference in its entirety for all purposes.

### (5) Vectors

[0441] The nucleic acid constructs disclosed herein can be provided in a vector for expression or for integration into and expression from a target genomic locus. A vector can comprise additional sequences such as, for example, replication origins, promoters, and genes encoding antibiotic resistance. A vector can also comprise nuclease agent components as disclosed elsewhere herein. For example, a vector can comprise a nucleic acid construct encoding a multidomain therapeutic protein, a CRISPR/Cas system (nucleic acids encoding Cas protein and gRNA), one or more components of a CRISPR/Cas system, or a combination thereof (e.g., a nucleic acid construct and a gRNA). In some cases, a vector comprising a nucleic acid construct encoding a multidomain therapeutic protein does not comprise any components of the nuclease agents described herein (e.g., does not comprise a nucleic acid encoding a Cas protein and does not comprise a nucleic acid encoding a gRNA). Some such vectors comprise homology arms corresponding to target sites in the target genomic locus. Other such vectors do not comprise any homology arms.

[0442] Some vectors may be circular. Alternatively, the vector may be linear. The vector can be packaged for delivered via a lipid nanoparticle, liposome, non-lipid nanoparticle, or viral capsid. Non-limiting exemplary vectors include plasmids, phagemids, cosmids, artificial chromosomes, minichromosomes, transposons, viral vectors, and expression vectors.

[0443] The vectors can be, for example, viral vectors such as adeno-associated virus (AAV) vectors. The AAV may be any suitable serotype and may be a single-stranded AAV (ssAAV) or a self-complementary AAV (scAAV). Other exemplary viruses/viral vectors include retroviruses, lentiviruses, adenoviruses, vaccinia viruses, poxviruses, and herpes simplex viruses. The viruses can infect dividing cells, non-dividing cells, or both dividing and non-dividing cells. The viruses can integrate into the host genome or alternatively do not integrate into the host genome. Such viruses can also be engineered to have reduced immunity. The viruses can be replication-competent or can be replication-defective (e.g., defective in one or more genes necessary for additional rounds of virion replication and/or packaging). Viruses can cause transient expression or longer-lasting expression. Viral vector may be genetically modified from their wild type counterparts. For example, the viral vector may comprise an insertion, deletion, or substitution of one or more nucleotides to facilitate cloning or such that one or more properties of the vector is changed. Such properties may include packaging capacity, transduction efficiency, immunogenicity, genome integration, replication, transcription, and translation. In some examples, a portion of the viral genome may be deleted such that the virus is capable of packaging exogenous sequences having a larger size. In some examples, the viral vector may have an enhanced transduction efficiency. In some examples, the immune response induced by the virus in a host may be reduced. In some examples, viral genes (such as integrase) that promote integration of the viral sequence into a host genome may be mutated such that the virus becomes non-integrating. In some examples, the viral vector may be replication defective. In some examples, the viral vector may comprise exogenous transcriptional or translational control sequences to drive expression of coding sequences on the vector. In some examples, the virus may be helper-dependent. For example, the virus may need one or more helper virus to supply viral components (such as viral proteins) required to amplify and package the vectors into viral particles. In such a case, one or more helper components, including one or more vectors encoding the viral components, may be introduced into a host cell or population of host cells along with the vector system described herein. In other examples, the virus may be helper-free. For example, the virus may be capable of amplifying and packaging the vectors without a helper virus. In some examples, the vector system described herein may also encode the viral components required for virus amplification and packaging.

[0444] Exemplary viral titers (e.g., AAV titers) include about 10¹² to about 10¹⁶ vg/mL. Other exemplary viral titers (e.g., AAV titers) include about 10¹² to about 10¹⁶ vg/kg of body weight.

[0445] Adeno-associated viruses (AAVs) are endemic in multiple species including human and non-human primates (NHPs). At least 12 natural serotypes and hundreds of natural variants have been isolated and characterized to date. See, e.g., Li et al. (2020) Nat. Rev. Genet. 21:255-272, herein incorporated by reference in its entirety for all purposes. AAV particles are naturally composed of a non-enveloped icosahedral protein capsid containing a single-stranded DNA (ssDNA) genome. The DNA genome is flanked by two inverted terminal repeats (ITRs) which serve as the viral origins of replication and packaging signals. The rep gene encodes four proteins required for viral replication and packaging whilst the cap gene encodes the three structural capsid subunits which dictate the AAV serotype, and the Assembly Activating Protein (AAP) which promotes virion assembly in some serotypes.

[0446] Recombinant AAV (rAAV) is currently one of the most commonly used viral vectors used in gene therapy to treat human diseases by delivering therapeutic transgenes to target cells in vivo. Indeed, rAAV vectors are composed of icosahedral capsids similar to natural AAVs, but rAAV virions do not encapsidate AAV protein-coding or AAV replicating sequences. These viral vectors are non-replicating. The only viral sequences required in rAAV vectors are the two ITRs, which are needed to guide genome replication and packaging during manufacturing of the rAAV vector. rAAV genomes are devoid of AAV rep and cap genes, rendering them non-replicating in vivo. rAAV vectors are produced by expressing rep and cap genes along with additional viral helper proteins in trans, in combination with the intended transgene cassette flanked by AAV ITRs.

[0447] In therapeutic rAAV genomes, a gene expression cassette is placed between ITR sequences. Typically, rAAV genome cassettes comprise of a promoter to drive expression of a therapeutic transgene, followed by polyadenylation sequence. The ITRs flanking a rAAV expression cassette are usually derived from AAV2, the first serotype to be isolated and converted into a recombinant viral vector. Since then, most rAAV production methods rely on AAV2 Rep-based packaging systems. See, e.g., Colella et al. (2017) Mol. Ther. Methods Clin. Dev. 8:87-104, herein incorporated by reference in its entirety for all purposes.

[0448] Some non-limiting examples of ITRs that can be used include ITRs comprising, consisting essentially of, or consisting of SEQ ID NO: 158, SEQ ID NO: 159, or SEQ ID NO: 160. Other examples of ITRs comprise one or more mutations compared to SEQ ID NO: 158, SEQ ID NO: 159, or SEQ ID NO: 160 and can be at least 90%, at least 91%, at least 92%, at least 93%, at least 94%, at least 95%, at least 96%, at least 97%, at least 98%, or at least 99% identical to SEQ ID NO: 158, SEQ ID NO: 159, or SEQ ID NO: 160. In some rAAV genomes disclosed herein, the nucleic acid construct is flanked on both sides by the same ITR (i.e., the ITR on the 5′ end, and the reverse complement of the ITR on the 3′ end, such as SEQ ID NO: 158 on the 5′ end and SEQ ID NO: 168 on the 3′ end, or SEQ ID NO: 159 on the 5′ end and SEQ ID NO: 613 on the 3′ end, or SEQ ID NO: 160 on the 5′ end and SEQ ID NO: 614 on the 3′ end). In one example, the ITR on each end can comprise, consist essentially of, or consist of SEQ ID NO: 158 (i.e., SEQ ID NO: 158 on the 5′ end, and the reverse complement on the 3′ end). In another example, the ITR on each end can comprise, consist essentially of, or consist of SEQ ID NO: 159 (i.e., SEQ ID NO: 159 on the 5′ end, and the reverse complement on the 3′ end). In one example, the ITR on at least one end comprises, consists essentially of, or consists of SEQ ID NO: 160. In one example, the ITR on the 5′ end comprises, consists essentially of, or consists of SEQ ID NO: 160. In one example, the ITR on the 3′ end comprises, consists essentially of, or consists of SEQ ID NO: 160. In one example, the ITR on each end can comprise, consist essentially of, or consist of SEQ ID NO: 160 (i.e., SEQ ID NO: 160 on the 5′ end, and the reverse complement on the 3′ end). In other rAAV genomes disclosed herein, the nucleic acid construct is flanked by different ITRs on each end. In one example, the ITR on one end comprises, consists essentially of, or consists of SEQ ID NO: 158, and the ITR on the other end comprises, consists essentially of, or consists of SEQ ID NO: 159. In another example, the ITR on one end comprises, consists essentially of, or consists of SEQ ID NO: 158, and the ITR on the other end comprises, consists essentially of, or consists of SEQ ID NO: 160. In one example, the ITR on one end comprises, consists essentially of, or consists of SEQ ID NO: 159, and the ITR on the other end comprises, consists essentially of, or consists of SEQ ID NO: 160.

[0449] The specific serotype of a recombinant AAV vector influences its in vivo tropism to specific tissues. AAV capsid proteins are responsible for mediating attachment and entry into target cells, followed by endosomal escape and trafficking to the nucleus. Thus, the choice of serotype when developing a rAAV vector will influence what cell types and tissues the vector is most likely to bind to and transduce when injected in vivo. Several serotypes of rAAVs, including rAAV8, are capable of transducing the liver when delivered systemically in mice, NHPs and humans. See, e.g., Li et al. (2020) Nat. Rev. Genet. 21:255-272, herein incorporated by reference in its entirety for all purposes.

[0450] Once in the nucleus, the ssDNA genome is released from the virion and a complementary DNA strand is synthesized to generate a double-stranded DNA (dsDNA) molecule. Double-stranded AAV genomes naturally circularize via their ITRs and become episomes which will persist extrachromosomally in the nucleus. Therefore, for episomal gene therapy programs, rAAV-delivered rAAV episomes provide long-term, promoter-driven gene expression in non-dividing cells. However, this rAAV-delivered episomal DNA is diluted out as cells divide. In contrast, the gene therapy described herein is based on gene insertion to allow long-term gene expression.

[0451] When specific rAAVs comprising specific sequences (e.g., specific bidirectional construct sequences or specific unidirectional construct sequences) are disclosed herein, they are meant to encompass the sequence disclosed or the reverse complement of the sequence. For example, if a bidirectional or unidirectional construct disclosed herein consists of the hypothetical sequence 5′-CTGGACCGA-3′, it is also meant to encompass the reverse complement of that sequence (5′-TCGGTCCAG-3′). Likewise, when rAAVs comprising bidirectional or unidirectional construct elements in a specific 5′ to 3′ order are disclosed herein, they are also meant to encompass the reverse complement of the order of those elements. For example, if an rAAV is disclosed herein that comprises a bidirectional construct that comprises from 5′ to 3′ a first splice acceptor, a first coding sequence, a first terminator, a reverse complement of a second terminator, a reverse complement of a second coding sequence, and a reverse complement of a second splice acceptor, it is also meant to encompass a construct comprising from 5′ to 3′ the second splice acceptor, the second coding sequence, the second terminator, a reverse complement of the first terminator, a reverse complement of the first coding sequence, and a reverse complement of the first splice acceptor. Single-stranded AAV genomes are packaged as either sense (plus-stranded) or anti-sense (minus-stranded genomes), and single-stranded AAV genomes of + and − polarity are packaged with equal frequency into mature rAAV virions. See, e.g., LING et al. (2015) J. Mol. Genet. Med. 9(3):175, Zhou et al. (2008) Mol. Ther. 16(3):494-499, and Samulski et al. (1987) J. Virol. 61:3096-3101, each of which is herein incorporated by reference in its entirety for all purposes.

[0452] The ssDNA AAV genome consists of two open reading frames, Rep and Cap, flanked by two inverted terminal repeats that allow for synthesis of the complementary DNA strand. When constructing an AAV transfer plasmid, the transgene is placed between the two ITRs, and Rep and Cap can be supplied in trans. In addition to Rep and Cap, AAV can require a helper plasmid containing genes from adenovirus. These genes (E4, E2a, and VA) mediate AAV replication. For example, the transfer plasmid, Rep/Cap, and the helper plasmid can be transfected into HEK293 cells containing the adenovirus gene E1+ to produce infectious AAV particles. Alternatively, the Rep, Cap, and adenovirus helper genes may be combined into a single plasmid. Similar packaging cells and methods can be used for other viruses, such as retroviruses.

[0453] Multiple serotypes of AAV have been identified. These serotypes differ in the types of cells they infect (i.e., their tropism), allowing preferential transduction of specific cell types. The term AAV includes, for example, AAV1, AAV2, AAV3, AAV3B, AAV4, AAV5, AAV6, AAV6.2, AAV7, AAVrh.64R1, AAVhu.37, AAVrh.8, AAVrh.32.33, AAV8, AAV9, AAV-DJ, AAV2/8, AAVrh10, AAVLK03, AV10, AAV11, AAV12, rh10, and hybrids thereof, avian AAV, bovine AAV, canine AAV, equine AAV, primate AAV, non-primate AAV, and ovine AAV. The genomic sequences of various serotypes of AAV, as well as the sequences of the native terminal repeats (TRs), Rep proteins, and capsid subunits are known in the art. Such sequences may be found in the literature or in public databases such as GenBank. An “AAV vector” as used herein refers to an AAV vector comprising a heterologous sequence not of AAV origin (i.e., a nucleic acid sequence heterologous to AAV), typically comprising a sequence encoding an exogenous polypeptide of interest (e.g., multidomain therapeutic protein). The construct may comprise an AAV1, AAV2, AAV3, AAV3B, AAV4, AAV5, AAV6, AAV6.2, AAV7, AAVrh.64R1, AAVhu.37, AAVrh.8, AAVrh.32.33, AAV8, AAV9, AAV-DJ, AAV2/8, AAVrh10, AAVLK03, AV10, AAV11, AAV12, rh10, and hybrids thereof, avian AAV, bovine AAV, canine AAV, equine AAV, primate AAV, non-primate AAV, and ovine AAV capsid sequence. In general, the heterologous nucleic acid sequence (the transgene) is flanked by at least one, and generally by two, AAV inverted terminal repeat sequences (ITRs). An AAV vector may either be single-stranded (ssAAV) or self-complementary (scAAV). Examples of serotypes for liver tissue include AAV3B, AAV5, AAV6, AAV7, AAV8, AAV9, AAVrh.74, and AAVhu.37, and particularly AAV8. In a specific example, the AAV vector comprising the nucleic acid construct can be recombinant AAV8 (rAAV8). A rAAV8 vector as described herein is one in which the capsid is from AAV8. For example, an AAV vector using ITRs from AAV2 and a capsid of AAV8 is considered herein to be a rAAV8 vector.

[0454] Tropism can be further refined through pseudotyping, which is the mixing of a capsid and a genome from different viral serotypes. For example, AAV2/5 indicates a virus containing the genome of serotype 2 packaged in the capsid from serotype 5. Use of pseudotyped viruses can improve transduction efficiency, as well as alter tropism. Hybrid capsids derived from different serotypes can also be used to alter viral tropism. For example, AAV-DJ contains a hybrid capsid from eight serotypes and displays high infectivity across a broad range of cell types in vivo. AAV-DJ8 is another example that displays the properties of AAV-DJ but with enhanced brain uptake. AAV serotypes can also be modified through mutations. Examples of mutational modifications of AAV2 include Y444F, Y500F, Y730F, and S662V. Examples of mutational modifications of AAV3 include Y705F, Y731F, and T492V. Examples of mutational modifications of AAV6 include S663V and T492V. Other pseudotyped/modified AAV variants include AAV2/1, AAV2/6, AAV2/7, AAV2/8, AAV2/9, AAV2.5, AAV8.2, and AAV/SASTG.

[0455] To accelerate transgene expression, self-complementary AAV (scAAV) variants can be used. Because AAV depends on the cell's DNA replication machinery to synthesize the complementary strand of the AAV's single-stranded DNA genome, transgene expression may be delayed. To address this delay, scAAV containing complementary sequences that are capable of spontaneously annealing upon infection can be used, eliminating the requirement for host cell DNA synthesis. However, single-stranded AAV (ssAAV) vectors can also be used.

[0456] To increase packaging capacity, longer transgenes may be split between two AAV transfer plasmids, the first with a 3′ splice donor and the second with a 5′ splice acceptor. Upon co-infection of a cell, these viruses form concatemers, are spliced together, and the full-length transgene can be expressed. Although this allows for longer transgene expression, expression is less efficient. Similar methods for increasing capacity utilize homologous recombination. For example, a transgene can be divided between two transfer plasmids but with substantial sequence overlap such that co-expression induces homologous recombination and expression of the full-length transgene.

### B. Nuclease Agents and CRISPR/Cas Systems

[0457] The methods and compositions disclosed herein can utilize nuclease agents such as Clustered Regularly Interspersed Short Palindromic Repeats (CRISPR)/CRISPR-associated (Cas) systems, zinc finger nuclease (ZFN) systems, or Transcription Activator-Like Effector Nuclease (TALEN) systems or components of such systems to modify a target genomic locus in a target gene such as a safe harbor gene (e.g., ALB) for insertion of a nucleic acid construct as disclosed herein. Generally, the nuclease agents involve the use of engineered cleavage systems to induce a double strand break or a nick (i.e., a single strand break) in a nuclease target site. Cleavage or nicking can occur through the use of specific nucleases such as engineered ZFNs, TALENs, or CRISPR/Cas systems with an engineered guide RNA to guide specific cleavage or nicking of the nuclease target site. Any nuclease agent that induces a nick or double-strand break at a desired target sequence can be used in the methods and compositions disclosed herein. The nuclease agent can be used to create a site of insertion at a desired locus (target gene) within a host genome, at which site the nucleic acid construct is inserted to express the multidomain therapeutic protein.

[0458] In one example, the nuclease agent is a CRISPR/Cas system. In another example, the nuclease agent comprises one or more ZFNs. In yet another example, the nuclease agent comprises one or more TALENs. In a specific example, the CRISPR/Cas systems or components of such systems target an ALB gene or locus (e.g., ALB genomic locus) within a cell, or intron 1 of an ALB gene or locus within a cell. In a more specific example, the CRISPR/Cas systems or components of such systems target a human ALB gene or locus or intron 1 of a human ALB gene or locus within a cell.

[0459] CRISPR/Cas systems include transcripts and other elements involved in the expression of, or directing the activity of, Cas genes. A CRISPR/Cas system can be, for example, a type I, a type II, a type III system, or a type V system (e.g., subtype V-A or subtype V-B). The methods and compositions disclosed herein can employ CRISPR/Cas systems by utilizing CRISPR complexes (comprising a guide RNA (gRNA) complexed with a Cas protein) for site-directed binding or cleavage of nucleic acids. A CRISPR/Cas system targeting an ALB gene or locus comprises a Cas protein (or a nucleic acid encoding the Cas protein) and one or more guide RNAs (or DNAs encoding the one or more guide RNAs), with each of the one or more guide RNAs targeting a different guide RNA target sequence in the target genomic locus (e.g., ALB gene or locus).

[0460] CRISPR/Cas systems used in the compositions and methods disclosed herein can be non-naturally occurring. A non-naturally occurring system includes anything indicating the involvement of the hand of man, such as one or more components of the system being altered or mutated from their naturally occurring state, being at least substantially free from at least one other component with which they are naturally associated in nature, or being associated with at least one other component with which they are not naturally associated. For example, some CRISPR/Cas systems employ non-naturally occurring CRISPR complexes comprising a gRNA and a Cas protein that do not naturally occur together, employ a Cas protein that does not occur naturally, or employ a gRNA that does not occur naturally.

### (1) Target Genomic Loci and Albumin (ALB)

[0461] Any target genomic locus capable of expressing a gene can be used, such as a safe harbor locus (safe harbor gene, such as ALB) or an endogenous GAA locus. The nucleic acid construct can be integrated into any part of the target genomic locus. For example, the nucleic acid construct can be inserted into an intron or an exon of a target genomic locus or can replace one or more introns and/or exons of a target genomic locus. In a specific example, the nucleic acid construct can be integrated into an intron of the target genomic locus, such as the first intron of the target genomic locus (e.g., ALB intron 1). See, e.g., WO 2020/082042, US 2020/0270617, WO 2020/082041, US 2020/0268906, WO 2020/082046, and US 2020/0289628, each of which is herein incorporated by reference in its entirety for all purposes. Constructs integrated into a target genomic locus can be operably linked to an endogenous promoter at the target genomic locus (e.g., the endogenous ALB promoter).

[0462] Interactions between integrated exogenous DNA and a host genome can limit the reliability and safety of integration and can lead to overt phenotypic effects that are not due to the targeted genetic modification but are instead due to unintended effects of the integration on surrounding endogenous genes. For example, randomly inserted transgenes can be subject to position effects and silencing, making their expression unreliable and unpredictable. Likewise, integration of exogenous DNA into a chromosomal locus can affect surrounding endogenous genes and chromatin, thereby altering cell behavior and phenotypes. Safe harbor loci include chromosomal loci where transgenes or other exogenous nucleic acid inserts can be stably and reliably expressed in all tissues of interest without overtly altering cell behavior or phenotype (i.e., without any deleterious effects on the host cell). See, e.g., Sadelain et al. (2012) Nat. Rev. Cancer 12:51-58, herein incorporated by reference in its entirety for all purposes. For example, the safe harbor locus can be one in which expression of the inserted gene sequence is not perturbed by any read-through expression from neighboring genes. For example, safe harbor loci can include chromosomal loci where exogenous DNA can integrate and function in a predictable manner without adversely affecting endogenous gene structure or expression. Safe harbor loci can include extragenic regions or intragenic regions such as, for example, loci within genes that are non-essential, dispensable, or able to be disrupted without overt phenotypic consequences.

[0463] Such safe harbor loci can offer an open chromatin configuration in all tissues and can be ubiquitously expressed during embryonic development and in adults. See, e.g., Zambrowicz et al. (1997) Proc. Natl. Acad. Sci. U.S.A. 94:3789-3794, herein incorporated by reference in its entirety for all purposes. In addition, the safe harbor loci can be targeted with high efficiency, and safe harbor loci can be disrupted with no overt phenotype. Examples of safe harbor loci include ALB, CCR5, HPRT, AAVS1, and Rosa26. See, e.g., U.S. Pat. Nos. 7,888,121; 7,972,854; 7,914,796; 7,951,925; 8,110,379; 8,409,861; 8,586,526; and US Patent Publication Nos. 2003/0232410; 2005/0208489; 2005/0026157; 2006/0063231; 2008/0159996; 2010/00218264; 2012/0017290; 2011/0265198; 2013/0137104; 2013/0122591; 2013/0177983; 2013/0177960; and 2013/0122591, each of which is herein incorporated by reference in its entirety for all purposes. Other examples of target genomic loci include an ALB locus, a EESYR locus, a SARS locus, position 188,083,272 of human chromosome 1 or its non-human mammalian orthologue, position 3,046,320 of human chromosome 10 or its non-human mammalian orthologue, position 67, 328,980 of human chromosome 17 or its non-human mammalian orthologue, an adeno-associated virus site 1 (AAVS1) on chromosome, a naturally occurring site of integration of AAV virus on human chromosome 19 or its non-human mammalian orthologue, a chemokine receptor 5 (CCR5) gene, a chemokine receptor gene encoding an HIV-1 coreceptor, or a mouse Rosa26 locus or its non-murine mammalian orthologue.

[0464] In a specific example, a safe harbor locus is a locus within the genome wherein a gene may be inserted without significant deleterious effects on the host cell such as a hepatocyte (e.g., without causing apoptosis, necrosis, and/or senescence, or without causing more than 5%, 10%, 15%, 20%, 25%, 30%, or 40% apoptosis, necrosis, and/or senescence as compared to a control population of cells). The safe harbor locus can allow overexpression of an exogenous gene without significant deleterious effects on the host cell such as a hepatocyte (e.g., without causing apoptosis, necrosis, and/or senescence, or without causing more than 5%, 10%, 15%, 20%, 25%, 30%, or 40% apoptosis, necrosis, and/or senescence as compared to a control population of cells). A desirable safe harbor locus may be one in which expression of the inserted gene sequence is not perturbed by read-through expression from neighboring genes. The safe harbor may be a human safe harbor (e.g., for a liver tissue or hepatocyte host cell).

[0465] In a specific example, the target genomic locus is an ALB locus, such as intron 1 of an ALB locus. In a more specific example, the target genomic locus is a human ALB locus, such as intron 1 of a human ALB locus (e.g., SEQ ID NO: 4).

### (2) Cas Proteins

[0466] Cas proteins generally comprise at least one RNA recognition or binding domain that can interact with guide RNAs. Cas proteins can also comprise nuclease domains (e.g., DNase domains or Rnase domains), DNA-binding domains, helicase domains, protein-protein interaction domains, dimerization domains, and other domains. Some such domains (e.g., Dnase domains) can be from a native Cas protein. Other such domains can be added to make a modified Cas protein. A nuclease domain possesses catalytic activity for nucleic acid cleavage, which includes the breakage of the covalent bonds of a nucleic acid molecule. Cleavage can produce blunt ends or staggered ends, and it can be single-stranded or double-stranded. For example, a wild type Cas9 protein will typically create a blunt cleavage product. Alternatively, a wild type Cpf1 protein (e.g., FnCpf1) can result in a cleavage product with a 5-nucleotide 5′ overhang, with the cleavage occurring after the 18^{th} base pair from the PAM sequence on the non-targeted strand and after the 23^{rd} base on the targeted strand. A Cas protein can have full cleavage activity to create a double-strand break at a target genomic locus (e.g., a double-strand break with blunt ends), or it can be a nickase that creates a single-strand break at a target genomic locus.

[0467] Examples of Cas proteins include Cas1, Cas1B, Cas2, Cas3, Cas4, Cas5, Cas5e (CasD), Cas6, Cas6e, Cas6f, Cas7, Cas8a1, Cas8a2, Cas8b, Cas8c, Cas9 (Csn1 or Csx12), Cas10, Cas10d, CasF, CasG, CasH, Csy1, Csy2, Csy3, Cse1 (CasA), Cse2 (CasB), Cse3 (CasE), Cse4 (CasC), Csc1, Csc2, Csa5, Csn2, Csm2, Csm3, Csm4, Csm5, Csm6, Cmr1, Cmr3, Cmr4, Cmr5, Cmr6, Csb1, Csb2, Csb3, Csx17, Csx14, Csx10, Csx16, CsaX, Csx3, Csx1, Csx15, Csf1, Csf2, Csf3, Csf4, and Cu1966, and homologs or modified versions thereof.

[0468] An exemplary Cas protein is a Cas9 protein or a protein derived from a Cas9 protein. Cas9 proteins are from a type II CRISPR/Cas system and typically share four key motifs with a conserved architecture. Motifs 1, 2, and 4 are RuvC-like motifs, and motif 3 is an HNH motif. Exemplary Cas9 proteins are from Streptococcus pyogenes, Streptococcus thermophilus, Streptococcus sp., Staphylococcus aureus, Nocardiopsis dassonvillei, Streptomyces pristinaespiralis, Streptomyces viridochromogenes, Streptomyces viridochromogenes, Streptosporangium roseum, Streptosporangium roseum, Alicyclobacillus acidocaldarius, Bacillus pseudomycoides, Bacillus selenitireducens, Exiguobacterium sibiricum, Lactobacillus delbrueckii, Lactobacillus salivarius, Microscilla marina, Burkholderiales bacterium, Polaromonas naphthalenivorans, Polaromonas sp., Crocosphaera watsonii, Cyanothece sp., Microcystis aeruginosa, Synechococcus sp., Acetohalobium arabaticum, Ammonifex degensii, Caldicelulosiruptor becscii, Cantidatus Desulforudis, Clostridium botulinum, Clostridium difficile, Finegoldia magna, Natranaerobius thermophilus, Pelotomaculum thermopropionicum, Acidithiobacillus caldus, Acidithiobacillus ferrooxidans, Allochromatium vinosum, Marinobacter sp., Nitrosococcus halophilus, Nitrosococcus watsoni, Pseudoalteromonas haloplanktis, Ktedonobacter racemifer, Methanohalobium evestigatum, Anabaena variabilis, Nodularia spumigena, Nostoc sp., Arthrospira maxima, Arthrospira platensis, Arthrospira sp., Lyngbya sp., Microcoleus chthonoplastes, Oscillatoria sp., Petrotoga mobilis, Thermosipho africanus, Acaryochloris marina, Neisseria meningitidis, or Campylobacter jejuni. Additional examples of the Cas9 family members are described in WO 2014/131833, herein incorporated by reference in its entirety for all purposes. Cas9 from S. pyogenes (SpCas9) (e.g., assigned UniProt accession number Q99ZW2) is an exemplary Cas9 protein. An exemplary SpCas9 protein sequence is set forth in SEQ ID NO: 8 (encoded by the DNA sequence set forth in SEQ ID NO: 9). An exemplary SpCas9 mRNA (cDNA) sequence is set forth in SEQ ID NO: 10. Smaller Cas9 proteins (e.g., Cas9 proteins whose coding sequences are compatible with the maximum AAV packaging capacity when combined with a guide RNA coding sequence and regulatory elements for the Cas9 and guide RNA, such as SaCas9 and CjCas9 and Nme2Cas9) are other exemplary Cas9 proteins. For example, Cas9 from S. aureus (SaCas9) (e.g., assigned UniProt accession number J7RUA5) is another exemplary Cas9 protein. Likewise, Cas9 from Campylobacter jejuni (CjCas9) (e.g., assigned UniProt accession number Q0P897) is another exemplary Cas9 protein. See, e.g., Kim et al. (2017) Nat. Commun. 8:14500, herein incorporated by reference in its entirety for all purposes. SaCas9 is smaller than SpCas9, and CjCas9 is smaller than both SaCas9 and SpCas9. Cas9 from Neisseria meningitidis (Nme2Cas9) is another exemplary Cas9 protein. See, e.g., Edraki et al. (2019) Mol. Cell 73(4):714-726, herein incorporated by reference in its entirety for all purposes. Cas9 proteins from Streptococcus thermophilus (e.g., Streptococcus thermophilus LMD-9 Cas9 encoded by the CRISPR1 locus (St1Cas9) or Streptococcus thermophilus Cas9 from the CRISPR3 locus (St3Cas9)) are other exemplary Cas9 proteins. Cas9 from Francisella novicida (FnCas9) or the RHA Francisella novicida Cas9 variant that recognizes an alternative PAM (E1369R/E1449H/R1556A substitutions) are other exemplary Cas9 proteins. These and other exemplary Cas9 proteins are reviewed, e.g., in Cebrian-Serrano and Davies (2017) Mamm. Genome 28(7):247-261, herein incorporated by reference in its entirety for all purposes. Examples of Cas9 coding sequences, Cas9 mRNAs, and Cas9 protein sequences are provided in WO 2013/176772, WO 2014/065596, WO 2016/106121, WO 2019/067910, WO 2020/082042, US 2020/0270617, WO 2020/082041, US 2020/0268906, WO 2020/082046, and US 2020/0289628, each of which is herein incorporated by reference in its entirety for all purposes. Specific examples of ORFs and Cas9 amino acid sequences are provided in Table 30 at paragraph [0449] WO 2019/067910, and specific examples of Cas9 mRNAs and ORFs are provided in paragraphs [0214]-[0234] of WO 2019/067910. See also WO 2020/082046 A2 (pp. 84-85) and Table 24 in WO 2020/069296, each of which is herein incorporated by reference in its entirety for all purposes. An exemplary SpCas9 protein sequence comprises, consists essentially of, or consists of SEQ ID NO: 11. An exemplary SpCas9 mRNA sequence encoding that SpCas9 protein sequence comprises, consists essentially of, or consists of SEQ ID NO: 12. Another exemplary SpCas9 mRNA sequence encoding that SpCas9 protein sequence comprises, consists essentially of, or consists of SEQ ID NO: 1. Another exemplary SpCas9 mRNA sequence encoding that SpCas9 protein sequence comprises SEQ ID NO: 2. An exemplary SpCas9 coding sequence comprises, consists essentially of, or consists of SEQ ID NO: 3.

[0469] Another example of a Cas protein is a Cpf1 (CRISPR from Prevotella and Francisella 1) protein. Cpf1 is a large protein (about 1300 amino acids) that contains a RuvC-like nuclease domain homologous to the corresponding domain of Cas9 along with a counterpart to the characteristic arginine-rich cluster of Cas9. However, Cpf1 lacks the HNH nuclease domain that is present in Cas9 proteins, and the RuvC-like domain is contiguous in the Cpf1 sequence, in contrast to Cas9 where it contains long inserts including the HNH domain. See, e.g., Zetsche et al. (2015) Cell 163(3):759-771, herein incorporated by reference in its entirety for all purposes. Exemplary Cpf1 proteins are from Francisella tularensis 1, Francisella tularensis subsp. Novicida, Prevotella albensis, Lachnospiraceae bacterium MC20171, Butyrivibrio proteoclasticus, Peregrinibacteria bacterium GW2011_GWA2_33_10, Parcubacteria bacterium GW2011_GWC2_44_17, Smithella sp. SCADC, Acidaminococcus sp. BV3L6, Lachnospiraceae bacterium MA2020, Cantidatus Methanoplasma termitum, Eubacterium eligens, Moraxella bovoculi 237, Leptospira inadai, Lachnospiraceae bacterium ND2006, Porphyromonas crevioricanis 3, Prevotella disiens, and Porphyromonas macacae. Cpf1 from Francisella novicida U112 (FnCpf1; assigned UniProt accession number AOQ7Q2) is an exemplary Cpf1 protein.

[0470] Another example of a Cas protein is CasX (Cas12e). CasX is an RNA-guided DNA endonuclease that generates a staggered double-strand break in DNA. CasX is less than 1000 amino acids in size. Exemplary CasX proteins are from Deltaproteobacteria (DpbCasX or DpbCas12e) and Planctomycetes (PlmCasX or PlmCas12e). Like Cpf1, CasX uses a single RuvC active site for DNA cleavage. See, e.g., Liu et al. (2019) Nature 566(7743):218-223, herein incorporated by reference in its entirety for all purposes.

[0471] Another example of a Cas protein is CasΦ (CasPhi or Cas12j), which is uniquely found in bacteriophages. CasΦ is less than 1000 amino acids in size (e.g., 700-800 amino acids). CasΦ cleavage generates staggered 5′ overhangs. A single RuvC active site in CasΦ is capable of crRNA processing and DNA cutting. See, e.g., Pausch et al. (2020) Science 369(6501):333-337, herein incorporated by reference in its entirety for all purposes.

[0472] Cas proteins can be wild type proteins (i.e., those that occur in nature), modified Cas proteins (i.e., Cas protein variants), or fragments of wild type or modified Cas proteins. Cas proteins can also be active variants or fragments with respect to catalytic activity of wild type or modified Cas proteins. Active variants or fragments with respect to catalytic activity can comprise at least 80%, 85%, 90%, 91%, 92%, 93%, 94%, 95%, 96%, 97%, 98%, 99% or more sequence identity to the wild type or modified Cas protein or a portion thereof, wherein the active variants retain the ability to cut at a desired cleavage site and hence retain nick-inducing or double-strand-break-inducing activity. Assays for nick-inducing or double-strand-break-inducing activity are known and generally measure the overall activity and specificity of the Cas protein on DNA substrates containing the cleavage site.

[0473] One example of a modified Cas protein is the modified SpCas9-HF1 protein, which is a high-fidelity variant of Streptococcus pyogenes Cas9 harboring alterations (N497A/R661A/Q695A/Q926A) designed to reduce non-specific DNA contacts. See, e.g., Kleinstiver et al. (2016) Nature 529(7587):490-495, herein incorporated by reference in its entirety for all purposes. Another example of a modified Cas protein is the modified eSpCas9 variant (K848A/K1003A/R1060A) designed to reduce off-target effects. See, e.g., Slaymaker et al. (2016) Science 351(6268):84-88, herein incorporated by reference in its entirety for all purposes. Other SpCas9 variants include K855A and K810A/K1003A/R1060A. These and other modified Cas proteins are reviewed, e.g., in Cebrian-Serrano and Davies (2017) Mamm. Genome 28(7):247-261, herein incorporated by reference in its entirety for all purposes. Another example of a modified Cas9 protein is xCas9, which is a SpCas9 variant that can recognize an expanded range of PAM sequences. See, e.g., Hu et al. (2018) Nature 556:57-63, herein incorporated by reference in its entirety for all purposes.

[0474] Cas proteins can be modified to increase or decrease one or more of nucleic acid binding affinity, nucleic acid binding specificity, and enzymatic activity. Cas proteins can also be modified to change any other activity or property of the protein, such as stability. For example, one or more nuclease domains of the Cas protein can be modified, deleted, or inactivated, or a Cas protein can be truncated to remove domains that are not essential for the function of the protein or to optimize (e.g., enhance or reduce) the activity of or a property of the Cas protein.

[0475] Cas proteins can comprise at least one nuclease domain, such as a Dnase domain. For example, a wild type Cpf1 protein generally comprises a RuvC-like domain that cleaves both strands of target DNA, perhaps in a dimeric configuration. Likewise, CasX and CasΦ D generally comprise a single RuvC-like domain that cleaves both strands of a target DNA. Cas proteins can also comprise at least two nuclease domains, such as Dnase domains. For example, a wild type Cas9 protein generally comprises a RuvC-like nuclease domain and an HNH-like nuclease domain. The RuvC and HNH domains can each cut a different strand of double-stranded DNA to make a double-stranded break in the DNA. See, e.g., Jinek et al. (2012) Science 337(6096):816-821, herein incorporated by reference in its entirety for all purposes.

[0476] One or more of the nuclease domains can be deleted or mutated so that they are no longer functional or have reduced nuclease activity. For example, if one of the nuclease domains is deleted or mutated in a Cas9 protein, the resulting Cas9 protein can be referred to as a nickase and can generate a single-strand break within a double-stranded target DNA but not a double-strand break (i.e., it can cleave the complementary strand or the non-complementary strand, but not both). If none of the nuclease domains is deleted or mutated in a Cas9 protein, the Cas9 protein will retain double-strand-break-inducing activity. An example of a mutation that converts Cas9 into a nickase is a D10A (aspartate to alanine at position 10 of Cas9) mutation in the RuvC domain of Cas9 from S. pyogenes. Likewise, H939A (histidine to alanine at amino acid position 839), H840A (histidine to alanine at amino acid position 840), or N863A (asparagine to alanine at amino acid position N863) in the HNH domain of Cas9 from S. pyogenes can convert the Cas9 into a nickase. Other examples of mutations that convert Cas9 into a nickase include the corresponding mutations to Cas9 from S. thermophilus. See, e.g., Sapranauskas et al. (2011) Nucleic Acids Res. 39(21):9275-9282 and WO 2013/141680, each of which is herein incorporated by reference in its entirety for all purposes. Such mutations can be generated using methods such as site-directed mutagenesis, PCR-mediated mutagenesis, or total gene synthesis. Examples of other mutations creating nickases can be found, for example, in WO 2013/176772 and WO 2013/142578, each of which is herein incorporated by reference in its entirety for all purposes.

[0477] Examples of inactivating mutations in the catalytic domains of xCas9 are the same as those described above for SpCas9. Examples of inactivating mutations in the catalytic domains of Staphylococcus aureus Cas9 proteins are also known. For example, the Staphylococcus aureus Cas9 enzyme (SaCas9) may comprise a substitution at position N580 (e.g., N580A substitution) or a substitution at position D10 (e.g., D10A substitution) to generate a Cas nickase. See, e.g., WO 2016/106236, herein incorporated by reference in its entirety for all purposes. Examples of inactivating mutations in the catalytic domains of Nme2Cas9 are also known (e.g., D16A or H588A). Examples of inactivating mutations in the catalytic domains of St1Cas9 are also known (e.g., D9A, D598A, H599A, or N622A). Examples of inactivating mutations in the catalytic domains of St3Cas9 are also known (e.g., D10A or N870A). Examples of inactivating mutations in the catalytic domains of CjCas9 are also known (e.g., combination of D8A or H559A). Examples of inactivating mutations in the catalytic domains of FnCas9 and RHA FnCas9 are also known (e.g., N995A).

[0478] Examples of inactivating mutations in the catalytic domains of Cpf1 proteins are also known. With reference to Cpf1 proteins from Francisella novicida U112 (FnCpf1), Acidaminococcus sp. BV3L6 (AsCpf1), Lachnospiraceae bacterium ND2006 (LbCpf1), and Moraxella bovoculi 237 (MbCpf1 Cpf1), such mutations can include mutations at positions 908, 993, or 1263 of AsCpf1 or corresponding positions in Cpf1 orthologs, or positions 832, 925, 947, or 1180 of LbCpf1 or corresponding positions in Cpf1 orthologs. Such mutations can include, for example, one or more of mutations D908A, E993A, and D1263A of AsCpf1 or corresponding mutations in Cpf1 orthologs, or D832A, E925A, D947A, and D1180A of LbCpf1 or corresponding mutations in Cpf1 orthologs. See, e.g., US 2016/0208243, herein incorporated by reference in its entirety for all purposes.

[0479] Examples of inactivating mutations in the catalytic domains of CasX proteins are also known. With reference to CasX proteins from Deltaproteobacteria, D672A, E769A, and D935A (individually or in combination) or corresponding positions in other CasX orthologs are inactivating. See, e.g., Liu et al. (2019) Nature 566(7743):218-223, herein incorporated by reference in its entirety for all purposes.

[0480] Examples of inactivating mutations in the catalytic domains of CasΦ D proteins are also known. For example, D371A and D394A, alone or in combination, are inactivating mutations. See, e.g., Pausch et al. (2020) Science 369(6501):333-337, herein incorporated by reference in its entirety for all purposes.

[0481] Cas proteins can also be operably linked to heterologous polypeptides as fusion proteins. For example, a Cas protein can be fused to a cleavage domain. See WO 2014/089290, herein incorporated by reference in its entirety for all purposesCas proteins can also be fused to a heterologous polypeptide providing increased or decreased stability. The fused domain or heterologous polypeptide can be located at the N-terminus, the C-terminus, or internally within the Cas protein.

[0482] As one example, a Cas protein can be fused to one or more heterologous polypeptides that provide for subcellular localization. Such heterologous polypeptides can include, for example, one or more nuclear localization signals (NLS) such as the monopartite SV40 NLS and/or a bipartite alpha-importin NLS for targeting to the nucleus, a mitochondrial localization signal for targeting to the mitochondria, an ER retention signal, and the like. See, e.g., Lange et al. (2007) J. Biol. Chem. 282(8):5101-5105, herein incorporated by reference in its entirety for all purposes. Such subcellular localization signals can be located at the N-terminus, the C-terminus, or anywhere within the Cas protein. An NLS can comprise a stretch of basic amino acids, and can be a monopartite sequence or a bipartite sequence. Optionally, a Cas protein can comprise two or more NLSs, including an NLS (e.g., an alpha-importin NLS or a monopartite NLS) at the N-terminus and an NLS (e.g., an SV40 NLS or a bipartite NLS) at the C-terminus. A Cas protein can also comprise two or more NLSs at the N-terminus and/or two or more NLSs at the C-terminus.

[0483] A Cas protein may, for example, be fused with 1-10 NLSs (e.g., fused with 1-5 NLSs or fused with one NLS. Where one NLS is used, the NLS may be linked at the N-terminus or the C-terminus of the Cas protein sequence. It may also be inserted within the Cas protein sequence. Alternatively, the Cas protein may be fused with more than one NLS. For example, the Cas protein may be fused with 2, 3, 4, or 5 NLSs. In a specific example, the Cas protein may be fused with two NLSs. In certain circumstances, the two NLSs may be the same (e.g., two SV40 NLSs) or different. For example, the Cas protein can be fused to two SV40 NLS sequences linked at the carboxy terminus. Alternatively, the Cas protein may be fused with two NLSs, one linked at the N-terminus and one at the C-terminus. In other examples, the Cas protein may be fused with 3 NLSs or with no NLS. The NLS may be a monopartite sequence, such as, e.g., the SV40 NLS, PKKKRKV (SEQ ID NO: 13) or PKKKRRV (SEQ ID NO: 14). The NLS may be a bipartite sequence, such as the NLS of nucleoplasmin, KRPAATKKAGQAKKKK (SEQ ID NO: 15). In a specific example, a single PKKKRKV (SEQ ID NO: 13) NLS may be linked at the C-terminus of the Cas protein. One or more linkers are optionally included at the fusion site.

[0484] Cas proteins can also be operably linked to a cell-penetrating domain or protein transduction domain. For example, the cell-penetrating domain can be derived from the HIV-1 TAT protein, the TLM cell-penetrating motif from human hepatitis B virus, MPG, Pep-1, VP22, a cell penetrating peptide from Herpes simplex virus, or a polyarginine peptide sequence. See, e.g., WO 2014/089290 and WO 2013/176772, each of which is herein incorporated by reference in its entirety for all purposes. The cell-penetrating domain can be located at the N-terminus, the C-terminus, or anywhere within the Cas protein.

[0485] Cas proteins can also be operably linked to a heterologous polypeptide for ease of tracking or purification, such as a fluorescent protein, a purification tag, or an epitope tag. Examples of fluorescent proteins include green fluorescent proteins (e.g., GFP, GFP-2, tagGFP, turboGFP, eGFP, Emerald, Azami Green, Monomeric Azami Green, CopGFP, AceGFP, ZsGreen1), yellow fluorescent proteins (e.g., YFP, eYFP, Citrine, Venus, YPet, PhiYFP, ZsYellow1), blue fluorescent proteins (e.g., eBFP, eBFP2, Azurite, mKalamal, GFPuv, Sapphire, T-sapphire), cyan fluorescent proteins (e.g., eCFP, Cerulean, CyPet, AmCyanl, Midoriishi-Cyan), red fluorescent proteins (e.g., mKate, mKate2, mPlum, DsRed monomer, mCherry, mRFP1, DsRed-Express, DsRed2, DsRed-Monomer, HcRed-Tandem, HcRed1, AsRed2, eqFP611, mRaspberry, mStrawberry, Jred), orange fluorescent proteins (e.g., mOrange, mKO, Kusabira-Orange, Monomeric Kusabira-Orange, mTangerine, tdTomato), and any other suitable fluorescent protein. Examples of tags include glutathione-S-transferase (GST), chitin binding protein (CBP), maltose binding protein, thioredoxin (TRX), poly(NANP), tandem affinity purification (TAP) tag, myc, AcV5, AU1, AU5, E, ECS, E2, FLAG, hemagglutinin (HA), nus, Softag 1, Softag 3, Strep, SBP, Glu-Glu, HSV, KT3, S, S1, T7, V5, VSV-G, histidine (His), biotin carboxyl carrier protein (BCCP), and calmodulin.

[0486] Cas proteins can also be tethered to labeled nucleic acids. Such tethering (i.e., physical linking) can be achieved through covalent interactions or noncovalent interactions, and the tethering can be direct (e.g., through direct fusion or chemical conjugation, which can be achieved by modification of cysteine or lysine residues on the protein or intein modification), or can be achieved through one or more intervening linkers or adapter molecules such as streptavidin or aptamers. See, e.g., Pierce et al. (2005) Mini Rev. Med. Chem. 5(1):41-55; Duckworth et al. (2007) Angew. Chem. Int. Ed. Engl. 46(46):8819-8822; Schaeffer and Dixon (2009) Australian J. Chem. 62(10):1328-1332; Goodman et al. (2009) Chembiochem. 10(9):1551-1557; and Khatwani et al. (2012) Bioorg. Med. Chem. 20(14):4532-4539, each of which is herein incorporated by reference in its entirety for all purposes. Noncovalent strategies for synthesizing protein-nucleic acid conjugates include biotin-streptavidin and nickel-histidine methods. Covalent protein-nucleic acid conjugates can be synthesized by connecting appropriately functionalized nucleic acids and proteins using a wide variety of chemistries. Some of these chemistries involve direct attachment of the oligonucleotide to an amino acid residue on the protein surface (e.g., a lysine amine or a cysteine thiol), while other more complex schemes require post-translational modification of the protein or the involvement of a catalytic or reactive protein domain. Methods for covalent attachment of proteins to nucleic acids can include, for example, chemical cross-linking of oligonucleotides to protein lysine or cysteine residues, expressed protein-ligation, chemoenzymatic methods, and the use of photoaptamers. The labeled nucleic acid can be tethered to the C-terminus, the N-terminus, or to an internal region within the Cas protein. In one example, the labeled nucleic acid is tethered to the C-terminus or the N-terminus of the Cas protein. Likewise, the Cas protein can be tethered to the 5′ end, the 3′ end, or to an internal region within the labeled nucleic acid. That is, the labeled nucleic acid can be tethered in any orientation and polarity. For example, the Cas protein can be tethered to the 5′ end or the 3′ end of the labeled nucleic acid.

[0487] Cas proteins can be provided in any form. For example, a Cas protein can be provided in the form of a protein, such as a Cas protein complexed with a gRNA. Alternatively, a Cas protein can be provided in the form of a nucleic acid encoding the Cas protein, such as an RNA (e.g., messenger RNA (mRNA)) or DNA. Optionally, the nucleic acid encoding the Cas protein can be codon optimized for efficient translation into protein in a particular cell or organism. For example, the nucleic acid encoding the Cas protein can be modified to substitute codons having a higher frequency of usage in a bacterial cell, a yeast cell, a human cell, a non-human cell, a mammalian cell, a rodent cell, a mouse cell, a rat cell, or any other host cell of interest, as compared to the naturally occurring polynucleotide sequence. When a nucleic acid encoding the Cas protein is introduced into the cell, the Cas protein can be transiently, conditionally, or constitutively expressed in the cell.

[0488] Nucleic acids encoding Cas proteins can be stably integrated in the genome of a cell and operably linked to a promoter active in the cell. Alternatively, nucleic acids encoding Cas proteins can be operably linked to a promoter in an expression construct. Expression constructs include any nucleic acid constructs capable of directing expression of a gene or other nucleic acid sequence of interest (e.g., a Cas gene) and which can transfer such a nucleic acid sequence of interest to a target cell. For example, the nucleic acid encoding the Cas protein can be in a vector comprising a DNA encoding a gRNA. Alternatively, it can be in a vector or plasmid that is separate from the vector comprising the DNA encoding the gRNA. Promoters that can be used in an expression construct include promoters active, for example, in one or more of a eukaryotic cell, a human cell, a non-human cell, a mammalian cell, a non-human mammalian cell, a rodent cell, a mouse cell, a rat cell, a pluripotent cell, an embryonic stem (ES) cell, an adult stem cell, a developmentally restricted progenitor cell, an induced pluripotent stem (iPS) cell, or a one-cell stage embryo. Such promoters can be, for example, conditional promoters, inducible promoters, constitutive promoters, or tissue-specific promoters. Optionally, the promoter can be a bidirectional promoter driving expression of both a Cas protein in one direction and a guide RNA in the other direction. Such bidirectional promoters can consist of (1) a complete, conventional, unidirectional Pol III promoter that contains 3 external control elements: a distal sequence element (DSE), a proximal sequence element (PSE), and a TATA box; and (2) a second basic Pol III promoter that includes a PSE and a TATA box fused to the 5′ terminus of the DSE in reverse orientation. For example, in the H1 promoter, the DSE is adjacent to the PSE and the TATA box, and the promoter can be rendered bidirectional by creating a hybrid promoter in which transcription in the reverse direction is controlled by appending a PSE and TATA box derived from the U6 promoter. See, e.g., US 2016/0074535, herein incorporated by references in its entirety for all purposes. Use of a bidirectional promoter to express genes encoding a Cas protein and a guide RNA simultaneously allow for the generation of compact expression cassettes to facilitate delivery. In preferred embodiments, promotors are accepted by regulatory authorities for use in humans. In certain embodiments, promotors drive expression in a liver cell.

[0489] Different promoters can be used to drive Cas expression or Cas9 expression. In some methods, small promoters are used so that the Cas or Cas9 coding sequence can fit into an AAV construct. For example, Cas or Cas9 and one or more gRNAs (e.g., 1 gRNA or 2 gRNAs or 3 gRNAs or 4 gRNAs) can be delivered via LNP-mediated delivery (e.g., in the form of RNA) or adeno-associated virus (AAV)-mediated delivery (e.g., AAV2-mediated delivery, AAV5-mediated delivery, AAV8-mediated delivery, or AAV7m8-mediated delivery). For example, the nuclease agent can be CRISPR/Cas9, and a Cas9 mRNA and a gRNA targeting an intron 1 of an endogenous human ALB locus can be delivered via LNP-mediated delivery or AAV-mediated delivery. The Cas or Cas9 and the gRNA(s) can be delivered in a single AAV or via two separate AAVs. For example, a first AAV can carry a Cas or Cas9 expression cassette, and a second AAV can carry a gRNA expression cassette. Similarly, a first AAV can carry a Cas or Cas9 expression cassette, and a second AAV can carry two or more gRNA expression cassettes. Alternatively, a single AAV can carry a Cas or Cas9 expression cassette (e.g., Cas or Cas9 coding sequence operably linked to a promoter) and a gRNA expression cassette (e.g., gRNA coding sequence operably linked to a promoter). Similarly, a single AAV can carry a Cas or Cas9 expression cassette (e.g., Cas or Cas9 coding sequence operably linked to a promoter) and two or more gRNA expression cassettes (e.g., gRNA coding sequences operably linked to promoters). Different promoters can be used to drive expression of the gRNA, such as a U6 promoter or the small tRNA Gln. Likewise, different promoters can be used to drive Cas9 expression. For example, small promoters are used so that the Cas9 coding sequence can fit into an AAV construct. Similarly, small Cas9 proteins (e.g., SaCas9 or CjCas9 are used to maximize the AAV packaging capacity).

[0490] Cas proteins provided as mRNAs can be modified for improved stability and/or immunogenicity properties. The modifications may be made to one or more nucleosides within the mRNA. Examples of chemical modifications to mRNA nucleobases include pseudouridine, 1-methyl-pseudouridine, and 5-methyl-cytidine. mRNA encoding Cas proteins can also be capped. The cap can be, for example, a cap 1 structure in which the +1 ribonucleotide is methylated at the 2′O position of the ribose. The capping can, for example, give superior activity in vivo (e.g., by mimicking a natural cap), can result in a natural structure that reduce stimulation of the innate immune system of the host (e.g., can reduce activation of pattern recognition receptors in the innate immune system). mRNA encoding Cas proteins can also be polyadenylated (to comprise a poly(A) tail). mRNA encoding Cas proteins can also be modified to include pseudouridine (e.g., can be fully substituted with pseudouridine). As another example, capped and polyadenylated Cas mRNA containing N1-methyl-pseudouridine can be used. mRNA encoding Cas proteins can also be modified to include N1-methyl-pseudouridine (e.g., can be fully substituted with N1-methyl-pseudouridine). As another example, Cas mRNA fully substituted with pseudouridine can be used (i.e., all standard uracil residues are replaced with pseudouridine, a uridine isomer in which the uracil is attached with a carbon-carbon bond rather than nitrogen-carbon). As another example, Cas mRNA fully substituted with N1-methyl-pseudouridine can be used (i.e., all standard uracil residues are replaced with N1-methyl-pseudouridine). Likewise, Cas mRNAs can be modified by depletion of uridine using synonymous codons. For example, capped and polyadenylated Cas mRNA fully substituted with pseudouridine can be used. For example, capped and polyadenylated Cas mRNA fully substituted with N1-methyl-pseudouridine can be used.

[0491] Cas mRNAs can comprise a modified uridine at least at one, a plurality of, or all uridine positions. The modified uridine can be a uridine modified at the 5 position (e.g., with a halogen, methyl, or ethyl). The modified uridine can be a pseudouridine modified at the 1 position (e.g., with a halogen, methyl, or ethyl). The modified uridine can be, for example, pseudouridine, N1-methyl-pseudouridine, 5-methoxyuridine, 5-iodouridine, or a combination thereof. In some examples, the modified uridine is 5-methoxyuridine. In some examples, the modified uridine is 5-iodouridine. In some examples, the modified uridine is pseudouridine. In some examples, the modified uridine is N1-methyl-pseudouridine. In some examples, the modified uridine is a combination of pseudouridine and N1-methyl-pseudouridine. In some examples, the modified uridine is a combination of pseudouridine and 5-methoxyuridine. In some examples, the modified uridine is a combination of N1-methyl pseudouridine and 5-methoxyuridine. In some examples, the modified uridine is a combination of 5-iodouridine and N1-methyl-pseudouridine. In some examples, the modified uridine is a combination of pseudouridine and 5-iodouridine. In some examples, the modified uridine is a combination of 5-iodouridine and 5-methoxyuridine.

[0492] Cas mRNAs disclosed herein can also comprise a 5′ cap, such as a Cap0, Cap1, or Cap2. A 5′ cap is generally a 7-methylguanine ribonucleotide (which may be further modified, e.g., with respect to ARCA) linked through a 5′-triphosphate to the 5′ position of the first nucleotide of the 5′-to-3′ chain of the mRNA (i.e., the first cap-proximal nucleotide). In Cap0, the riboses of the first and second cap-proximal nucleotides of the mRNA both comprise a 2′-hydroxyl. In Cap1, the riboses of the first and second transcribed nucleotides of the mRNA comprise a 2′-methoxy and a 2′-hydroxyl, respectively. In Cap2, the riboses of the first and second cap-proximal nucleotides of the mRNA both comprise a 2′-methoxy. See, e.g., Katibah et al. (2014) Proc. Natl. Acad. Sci. U.S.A. 111(33):12025-30 and Abbas et al. (2017) Proc. Natl. Acad. Sci. U.S.A. 114(11):E2106-E2115, each of which is herein incorporated by reference in its entirety for all purposes. Most endogenous higher eukaryotic mRNAs, including mammalian mRNAs such as human mRNAs, comprise Cap1 or Cap2. Cap0 and other cap structures differing from Cap1 and Cap2 may be immunogenic in mammals, such as humans, due to recognition as non-self by components of the innate immune system such as IFIT-1 and IFIT-5, which can result in elevated cytokine levels including type I interferon. Components of the innate immune system such as IFIT-1 and IFIT-5 may also compete with eIF4E for binding of an mRNA with a cap other than Cap1 or Cap2, potentially inhibiting translation of the mRNA.

[0493] A cap can be included co-transcriptionally. For example, ARCA (anti-reverse cap analog; Thermo Fisher Scientific Cat. No. AM8045) is a cap analog comprising a 7-methylguanine 3′-methoxy-5′-triphosphate linked to the 5′ position of a guanine ribonucleotide which can be incorporated in vitro into a transcript at initiation. ARCA results in a Cap0 cap in which the 2′ position of the first cap-proximal nucleotide is hydroxyl. See, e.g., Stepinski et al. (2001) RNA 7:1486-1495, herein incorporated by reference in its entirety for all purposes.

[0494] CleanCap™ AG (m7G(5′)ppp(5′)(2′OMeA)pG; TriLink Biotechnologies Cat. No. N-7113) or CleanCap™ GG (m7G(5′)ppp(5′)(2′OMeG)pG; TriLink Biotechnologies Cat. No. N-7133) can be used to provide a Cap1 structure co-transcriptionally. 3′-O-methylated versions of CleanCap™ AG and CleanCap™ GG are also available from TriLink Biotechnologies as Cat. Nos. N-7413 and N-7433, respectively.

[0495] Alternatively, a cap can be added to an RNA post-transcriptionally. For example, Vaccinia capping enzyme is commercially available (New England Biolabs Cat. No. M2080S) and has RNA triphosphatase and guanylyltransferase activities, provided by its D1 subunit, and guanine methyltransferase, provided by its D12 subunit. As such, it can add a 7-methylguanine to an RNA, so as to give Cap0, in the presence of S-adenosyl methionine and GTP. See, e.g., Guo and Moss (1990) Proc. Natl. Acad. Sci. U.S.A. 87:4023-4027 and Mao and Shuman (1994) J. Biol. Chem. 269:24472-24479, each of which is herein incorporated by reference in its entirety for all purposes.

[0496] Cas mRNAs can further comprise a poly-adenylated (poly-A or poly(A) or poly-adenine) tail. The poly-A tail can, for example, comprise at least 20, at least 30, at least 40, at least 50, at least 60, at least 70, at least 80, at least 90, or at least 100 adenines, and optionally up to 300 adenines. For example, the poly-A tail can comprise 95, 96, 97, 98, 99, or 100 adenine nucleotides.

### (3) Guide RNAs

[0497] A “guide RNA” or “gRNA” is an RNA molecule that binds to a Cas protein (e.g., Cas9 protein) and targets the Cas protein to a specific location within a target DNA. Guide RNAs can comprise two segments: a “DNA-targeting segment” (also called “guide sequence”) and a “protein-binding segment.” “Segment” includes a section or region of a molecule, such as a contiguous stretch of nucleotides in an RNA. Some gRNAs, such as those for Cas9, can comprise two separate RNA molecules: an “activator-RNA” (e.g., tracrRNA) and a “targeter-RNA” (e.g., CRISPR RNA or crRNA). Other gRNAs are a single RNA molecule (single RNA polynucleotide), which can also be called a “single-molecule gRNA,” a “single-guide RNA,” or an “sgRNA.” See, e.g., WO 2013/176772, WO 2014/065596, WO 2014/089290, WO 2014/093622, WO 2014/099750, WO 2013/142578, and WO 2014/131833, each of which is herein incorporated by reference in its entirety for all purposes. A guide RNA can refer to either a CRISPR RNA (crRNA) or the combination of a crRNA and a trans-activating CRISPR RNA (tracrRNA). The crRNA and tracrRNA can be associated as a single RNA molecule (single guide RNA or sgRNA) or in two separate RNA molecules (dual guide RNA or dgRNA). For Cas9, for example, a single-guide RNA can comprise a crRNA fused to a tracrRNA (e.g., via a linker). For Cpf1 and CasΦ, for example, only a crRNA is needed to achieve binding to a target sequence. The terms “guide RNA” and “gRNA” include both double-molecule (i.e., modular) gRNAs and single-molecule gRNAs. In some of the methods and compositions disclosed herein, a gRNA is a S. pyogenes Cas9 gRNA or an equivalent thereof. In some of the methods and compositions disclosed herein, a gRNA is a S. aureus Cas9 gRNA or an equivalent thereof.

[0498] An exemplary two-molecule gRNA comprises a crRNA-like (“CRISPR RNA” or “targeter-RNA” or “crRNA” or “crRNA repeat”) molecule and a corresponding tracrRNA-like (“trans-activating CRISPR RNA” or “activator-RNA” or “tracrRNA”) molecule. A crRNA comprises both the DNA-targeting segment (single-stranded) of the gRNA and a stretch of nucleotides that forms one half of the dsRNA duplex of the protein-binding segment of the gRNA. An example of a crRNA tail (e.g., for use with S. pyogenes Cas9), located downstream (3′) of the DNA-targeting segment, comprises, consists essentially of, or consists of GUUUUAGAGCUAUGCU (SEQ ID NO: 16) or GUUUUAGAGCUAUGCUGUUUUG (SEQ ID NO: 17). Any of the DNA-targeting segments disclosed herein can be joined to the 5′ end of SEQ ID NO: 16 or 17 to form a crRNA.

[0499] A corresponding tracrRNA (activator-RNA) comprises a stretch of nucleotides that forms the other half of the dsRNA duplex of the protein-binding segment of the gRNA. A stretch of nucleotides of a crRNA are complementary to and hybridize with a stretch of nucleotides of a tracrRNA to form the dsRNA duplex of the protein-binding domain of the gRNA. As such, each crRNA can be said to have a corresponding tracrRNA. Examples of tracrRNA sequences (e.g., for use with S. pyogenes Cas9) comprise, consist essentially of, or consist of any one of

(SEQ ID NO: 18)
AGCAUAGCAAGUUAAAAUAAGGCUAGUCCGUUAUCAACUUGAAAAAGU
GGCACCGAGUCGGUGCUUU,
(SEQ ID NO: 19)
AAACAGCAUAGCAAGUUAAAAUAAGGCUAGUCCGUUAUCAACUUGAAA
AAGUGGCACCGAGUCGGUGCUUUU,
or
(SEQ ID NO: 20)
GUUGGAACCAUUCAAAACAGCAUAGCAAGUUAAAAUAAGGCUAGUCCG
UUAUCAACUUGAAAAAGUGGCACCGAGUCGGUGC.

[0500] In systems in which both a crRNA and a tracrRNA are needed, the crRNA and the corresponding tracrRNA hybridize to form a gRNA. In systems in which only a crRNA is needed, the crRNA can be the gRNA. The crRNA additionally provides the single-stranded DNA-targeting segment that hybridizes to the complementary strand of a target DNA. If used for modification within a cell, the exact sequence of a given crRNA or tracrRNA molecule can be designed to be specific to the species in which the RNA molecules will be used. See, e.g., Mali et al. (2013) Science 339(6121):823-826; Jinek et al. (2012) Science 337(6096):816-821; Hwang et al. (2013) Nat. Biotechnol. 31(3):227-229; Jiang et al. (2013) Nat. Biotechnol. 31(3):233-239; and Cong et al. (2013) Science 339(6121):819-823, each of which is herein incorporated by reference in its entirety for all purposes.

[0501] The DNA-targeting segment (crRNA) of a given gRNA comprises a nucleotide sequence that is complementary to a sequence on the complementary strand of the target DNA, as described in more detail below. The DNA-targeting segment of a gRNA interacts with the target DNA in a sequence-specific manner via hybridization (i.e., base pairing). As such, the nucleotide sequence of the DNA-targeting segment may vary and determines the location within the target DNA with which the gRNA and the target DNA will interact. The DNA-targeting segment of a subject gRNA can be modified to hybridize to any desired sequence within a target DNA. Naturally occurring crRNAs differ depending on the CRISPR/Cas system and organism but often contain a targeting segment of between 21 to 72 nucleotides length, flanked by two direct repeats (DR) of a length of between 21 to 46 nucleotides (see, e.g., WO 2014/131833, herein incorporated by reference in its entirety for all purposes). In the case of S. pyogenes, the DRs are 36 nucleotides long and the targeting segment is 30 nucleotides long. The 3′ located DR is complementary to and hybridizes with the corresponding tracrRNA, which in turn binds to the Cas protein.

[0502] The DNA-targeting segment can have, for example, a length of at least about 12, at least about 15, at least about 17, at least about 18, at least about 19, at least about 20, at least about 25, at least about 30, at least about 35, or at least about 40 nucleotides. Such DNA-targeting segments can have, for example, a length from about 12 to about 100, from about 12 to about 80, from about 12 to about 50, from about 12 to about 40, from about 12 to about 30, from about 12 to about 25, or from about 12 to about 20 nucleotides. For example, the DNA targeting segment can be from about 15 to about 25 nucleotides (e.g., from about 17 to about 20 nucleotides, or about 17, 18, 19, or 20 nucleotides). See, e.g., US 2016/0024523, herein incorporated by reference in its entirety for all purposes. For Cas9 from S. pyogenes, a typical DNA-targeting segment is between 16 and 20 nucleotides in length or between 17 and 20 nucleotides in length. For Cas9 from S. aureus, a typical DNA-targeting segment is between 21 and 23 nucleotides in length. For Cpf1, a typical DNA-targeting segment is at least 16 nucleotides in length or at least 18 nucleotides in length.

[0503] In one example, the DNA-targeting segment can be about 20 nucleotides in length. However, shorter and longer sequences can also be used for the targeting segment (e.g., 15-25 nucleotides in length, such as 15, 16, 17, 18, 19, 20, 21, 22, 23, 24, or 25 nucleotides in length). The degree of identity between the DNA-targeting segment and the corresponding guide RNA target sequence (or degree of complementarity between the DNA-targeting segment and the other strand of the guide RNA target sequence) can be, for example, about 75%, about 80%, about 85%, about 90%, about 95%, or 100%. The DNA-targeting segment and the corresponding guide RNA target sequence can contain one or more mismatches. For example, the DNA-targeting segment of the guide RNA and the corresponding guide RNA target sequence can contain 1-4, 1-3, 1-2, 1, 2, 3, or 4 mismatches (e.g., where the total length of the guide RNA target sequence is at least 17, at least 18, at least 19, or at least 20 or more nucleotides). For example, the DNA-targeting segment of the guide RNA and the corresponding guide RNA target sequence can contain 1-4, 1-3, 1-2, 1, 2, 3, or 4 mismatches where the total length of the guide RNA target sequence 20 nucleotides.

[0504] As one example, a guide RNA targeting intron 1 of a human ALB gene can comprise a DNA-targeting segment (i.e., guide sequence) comprising, consisting essentially of, or consisting of the sequence (DNA-targeting segment) set forth in any one of SEQ ID NOS: 30-61. Alternatively, a guide RNA targeting intron 1 of a human ALB gene can comprise a DNA-targeting segment comprising, consisting essentially of, or consisting of at least 17, at least 18, at least 19, or at least 20 contiguous nucleotides of the sequence (DNA-targeting segment) set forth in any one of SEQ ID NOS: 30-61. Alternatively, a guide RNA targeting intron 1 of a human ALB gene can comprise a DNA-targeting segment that is at least 75%, at least 80%, at least 85%, at least 90%, or at least 95% identical to the sequence (DNA-targeting segment) set forth in any one of SEQ ID NOS: 30-61. Alternatively, a guide RNA targeting intron 1 of a human ALB gene can comprise a DNA-targeting segment that is at least 90% or at least 95% identical to the sequence (DNA-targeting segment) set forth in any one of SEQ ID NOS: 30-61. Alternatively, a guide RNA targeting intron 1 of a human ALB gene can comprise a DNA-targeting segment that is at least 75%, at least 80%, at least 85%, at least 90%, or at least 95% identical to at least 17, at least 18, at least 19, or at least 20 contiguous nucleotides of the sequence (DNA-targeting segment) set forth in any one of SEQ ID NOS: 30-61. Alternatively, a guide RNA targeting intron 1 of a human ALB gene can comprise a DNA-targeting segment that is at least 90% or at least 95% identical to at least 17, at least 18, at least 19, or at least 20 contiguous nucleotides of the sequence (DNA-targeting segment) set forth in any one of SEQ ID NOS: 30-61. Alternatively, a guide RNA targeting intron 1 of a human ALB gene can comprise a DNA-targeting segment comprising, consisting essentially of, or consisting of a sequence that differs by no more than 3, no more than 2, or no more than 1 nucleotide from the sequence (DNA-targeting segment) set forth in any one of SEQ ID NOS: 30-61. Alternatively, a guide RNA targeting intron 1 of a human ALB gene can comprise a DNA-targeting segment comprising, consisting essentially of, or consisting of a sequence that differs by no more than 3, no more than 2, or no more than 1 nucleotide from at least 17, at least 18, at least 19, or at least 20 contiguous nucleotides of the sequence (DNA-targeting segment) set forth in any one of SEQ ID NOS: 30-61.

[0505] As another example, a guide RNA targeting intron 1 of a human ALB gene can comprise a DNA-targeting segment (i.e., guide sequence) comprising, consisting essentially of, or consisting of the sequence (DNA-targeting segment) set forth in any one of SEQ ID NOS: 36, 30, 33, and 41. Alternatively, a guide RNA targeting intron 1 of a human ALB gene can comprise a DNA-targeting segment comprising, consisting essentially of, or consisting of at least 17, at least 18, at least 19, or at least 20 contiguous nucleotides of the sequence (DNA-targeting segment) set forth in any one of SEQ ID NOS: 36, 30, 33, and 41. Alternatively, a guide RNA targeting intron 1 of a human ALB gene can comprise a DNA-targeting segment that is at least 75%, at least 80%, at least 85%, at least 90%, or at least 95% identical to the sequence (DNA-targeting segment) set forth in any one of SEQ ID NOS: 36, 30, 33, and 41. Alternatively, a guide RNA targeting intron 1 of a human ALB gene can comprise a DNA-targeting segment that is at least 90% or at least 95% identical to the sequence (DNA-targeting segment) set forth in any one of SEQ ID NOS: 36, 30, 33, and 41. Alternatively, a guide RNA targeting intron 1 of a human ALB gene can comprise a DNA-targeting segment that is at least 75%, at least 80%, at least 85%, at least 90%, or at least 95% identical to at least 17, at least 18, at least 19, or at least 20 contiguous nucleotides of the sequence (DNA-targeting segment) set forth in any one of SEQ ID NOS: 36, 30, 33, and 41. Alternatively, a guide RNA targeting intron 1 of a human ALB gene can comprise a DNA-targeting segment that is at least 90% or at least 95% identical to at least 17, at least 18, at least 19, or at least 20 contiguous nucleotides of the sequence (DNA-targeting segment) set forth in any one of SEQ ID NOS: 36, 30, 33, and 41. Alternatively, a guide RNA targeting intron 1 of a human ALB gene can comprise a DNA-targeting segment comprising, consisting essentially of, or consisting of a sequence that differs by no more than 3, no more than 2, or no more than 1 nucleotide from the sequence (DNA-targeting segment) set forth in any one of SEQ ID NOS: 36, 30, 33, and 41. Alternatively, a guide RNA targeting intron 1 of a human ALB gene can comprise a DNA-targeting segment comprising, consisting essentially of, or consisting of a sequence that differs by no more than 3, no more than 2, or no more than 1 nucleotide from at least 17, at least 18, at least 19, or at least 20 contiguous nucleotides of the sequence (DNA-targeting segment) set forth in any one of SEQ ID NOS: 36, 30, 33, and 41.

[0506] As another example, a guide RNA targeting intron 1 of a human ALB gene can comprise a DNA-targeting segment (i.e., guide sequence) comprising, consisting essentially of, or consisting of the sequence (DNA-targeting segment) set forth in SEQ ID NO: 36. Alternatively, a guide RNA targeting intron 1 of a human ALB gene can comprise a DNA-targeting segment comprising, consisting essentially of, or consisting of at least 17, at least 18, at least 19, or at least 20 contiguous nucleotides of the sequence (DNA-targeting segment) set forth in SEQ ID NO: 36. Alternatively, a guide RNA targeting intron 1 of a human ALB gene can comprise a DNA-targeting segment that is at least 75%, at least 80%, at least 85%, at least 90%, or at least 95% identical to the sequence (DNA-targeting segment) set forth in SEQ ID NO: 36. Alternatively, a guide RNA targeting intron 1 of a human ALB gene can comprise a DNA-targeting segment that is at least 90% or at least 95% identical to the sequence (DNA-targeting segment) set forth in SEQ ID NO: 36. Alternatively, a guide RNA targeting intron 1 of a human ALB gene can comprise a DNA-targeting segment that is at least 75%, at least 80%, at least 85%, at least 90%, or at least 95% identical to at least 17, at least 18, at least 19, or at least 20 contiguous nucleotides of the sequence (DNA-targeting segment) set forth in SEQ ID NO: 36. Alternatively, a guide RNA targeting intron 1 of a human ALB gene can comprise a DNA-targeting segment that is at least 90% or at least 95% identical to at least 17, at least 18, at least 19, or at least 20 contiguous nucleotides of the sequence (DNA-targeting segment) set forth in SEQ ID NO: 36. Alternatively, a guide RNA targeting intron 1 of a human ALB gene can comprise a DNA-targeting segment comprising, consisting essentially of, or consisting of a sequence that differs by no more than 3, no more than 2, or no more than 1 nucleotide from the sequence (DNA-targeting segment) set forth in SEQ ID NO: 36. Alternatively, a guide RNA targeting intron 1 of a human ALB gene can comprise a DNA-targeting segment comprising, consisting essentially of, or consisting of a sequence that differs by no more than 3, no more than 2, or no more than 1 nucleotide from at least 17, at least 18, at least 19, or at least 20 contiguous nucleotides of the sequence (DNA-targeting segment) set forth in SEQ ID NO: 36.

[0507] As another example, a guide RNA targeting intron 1 of a human ALB gene can comprise a DNA-targeting segment (i.e., guide sequence) comprising, consisting essentially of, or consisting of the sequence (DNA-targeting segment) set forth in SEQ ID NO: 30. Alternatively, a guide RNA targeting intron 1 of a human ALB gene can comprise a DNA-targeting segment comprising, consisting essentially of, or consisting of at least 17, at least 18, at least 19, or at least 20 contiguous nucleotides of the sequence (DNA-targeting segment) set forth in SEQ ID NO: 30. Alternatively, a guide RNA targeting intron 1 of a human ALB gene can comprise a DNA-targeting segment that is at least 75%, at least 80%, at least 85%, at least 90%, or at least 95% identical to the sequence (DNA-targeting segment) set forth in SEQ ID NO: 30. Alternatively, a guide RNA targeting intron 1 of a human ALB gene can comprise a DNA-targeting segment that is at least 90% or at least 95% identical to the sequence (DNA-targeting segment) set forth in SEQ ID NO: 30. Alternatively, a guide RNA targeting intron 1 of a human ALB gene can comprise a DNA-targeting segment that is at least 75%, at least 80%, at least 85%, at least 90%, or at least 95% identical to at least 17, at least 18, at least 19, or at least 20 contiguous nucleotides of the sequence (DNA-targeting segment) set forth in SEQ ID NO: 30. Alternatively, a guide RNA targeting intron 1 of a human ALB gene can comprise a DNA-targeting segment that is at least 90% or at least 95% identical to at least 17, at least 18, at least 19, or at least 20 contiguous nucleotides of the sequence (DNA-targeting segment) set forth in SEQ ID NO: 30. Alternatively, a guide RNA targeting intron 1 of a human ALB gene can comprise a DNA-targeting segment comprising, consisting essentially of, or consisting of a sequence that differs by no more than 3, no more than 2, or no more than 1 nucleotide from the sequence (DNA-targeting segment) set forth in SEQ ID NO: 30. Alternatively, a guide RNA targeting intron 1 of a human ALB gene can comprise a DNA-targeting segment comprising, consisting essentially of, or consisting of a sequence that differs by no more than 3, no more than 2, or no more than 1 nucleotide from at least 17, at least 18, at least 19, or at least 20 contiguous nucleotides of the sequence (DNA-targeting segment) set forth in SEQ ID NO: 30.

[0508] As another example, a guide RNA targeting intron 1 of a human ALB gene can comprise a DNA-targeting segment (i.e., guide sequence) comprising, consisting essentially of, or consisting of the sequence (DNA-targeting segment) set forth in SEQ ID NO: 33. Alternatively, a guide RNA targeting intron 1 of a human ALB gene can comprise a DNA-targeting segment comprising, consisting essentially of, or consisting of at least 17, at least 18, at least 19, or at least 20 contiguous nucleotides of the sequence (DNA-targeting segment) set forth in SEQ ID NO: 33. Alternatively, a guide RNA targeting intron 1 of a human ALB gene can comprise a DNA-targeting segment that is at least 75%, at least 80%, at least 85%, at least 90%, or at least 95% identical to the sequence (DNA-targeting segment) set forth in SEQ ID NO: 33. Alternatively, a guide RNA targeting intron 1 of a human ALB gene can comprise a DNA-targeting segment that is at least 90% or at least 95% identical to the sequence (DNA-targeting segment) set forth in SEQ ID NO: 33. Alternatively, a guide RNA targeting intron 1 of a human ALB gene can comprise a DNA-targeting segment that is at least 75%, at least 80%, at least 85%, at least 90%, or at least 95% identical to at least 17, at least 18, at least 19, or at least 20 contiguous nucleotides of the sequence (DNA-targeting segment) set forth in SEQ ID NO: 33. Alternatively, a guide RNA targeting intron 1 of a human ALB gene can comprise a DNA-targeting segment that is at least 90% or at least 95% identical to at least 17, at least 18, at least 19, or at least 20 contiguous nucleotides of the sequence (DNA-targeting segment) set forth in SEQ ID NO: 33. Alternatively, a guide RNA targeting intron 1 of a human ALB gene can comprise a DNA-targeting segment comprising, consisting essentially of, or consisting of a sequence that differs by no more than 3, no more than 2, or no more than 1 nucleotide from the sequence (DNA-targeting segment) set forth in SEQ ID NO: 33. Alternatively, a guide RNA targeting intron 1 of a human ALB gene can comprise a DNA-targeting segment comprising, consisting essentially of, or consisting of a sequence that differs by no more than 3, no more than 2, or no more than 1 nucleotide from at least 17, at least 18, at least 19, or at least 20 contiguous nucleotides of the sequence (DNA-targeting segment) set forth in SEQ ID NO: 33.

[0509] As another example, a guide RNA targeting intron 1 of a human ALB gene can comprise a DNA-targeting segment (i.e., guide sequence) comprising, consisting essentially of, or consisting of the sequence (DNA-targeting segment) set forth in SEQ ID NO: 41. Alternatively, a guide RNA targeting intron 1 of a human ALB gene can comprise a DNA-targeting segment comprising, consisting essentially of, or consisting of at least 17, at least 18, at least 19, or at least 20 contiguous nucleotides of the sequence (DNA-targeting segment) set forth in SEQ ID NO: 41. Alternatively, a guide RNA targeting intron 1 of a human ALB gene can comprise a DNA-targeting segment that is at least 75%, at least 80%, at least 85%, at least 90%, or at least 95% identical to the sequence (DNA-targeting segment) set forth in SEQ ID NO: 41. Alternatively, a guide RNA targeting intron 1 of a human ALB gene can comprise a DNA-targeting segment that is at least 90% or at least 95% identical to the sequence (DNA-targeting segment) set forth in SEQ ID NO: 41. Alternatively, a guide RNA targeting intron 1 of a human ALB gene can comprise a DNA-targeting segment that is at least 75%, at least 80%, at least 85%, at least 90%, or at least 95% identical to at least 17, at least 18, at least 19, or at least 20 contiguous nucleotides of the sequence (DNA-targeting segment) set forth in SEQ ID NO: 41. Alternatively, a guide RNA targeting intron 1 of a human ALB gene can comprise a DNA-targeting segment that is at least 90% or at least 95% identical to at least 17, at least 18, at least 19, or at least 20 contiguous nucleotides of the sequence (DNA-targeting segment) set forth in SEQ ID NO: 41. Alternatively, a guide RNA targeting intron 1 of a human ALB gene can comprise a DNA-targeting segment comprising, consisting essentially of, or consisting of a sequence that differs by no more than 3, no more than 2, or no more than 1 nucleotide from the sequence (DNA-targeting segment) set forth in SEQ ID NO: 41. Alternatively, a guide RNA targeting intron 1 of a human ALB gene can comprise a DNA-targeting segment comprising, consisting essentially of, or consisting of a sequence that differs by no more than 3, no more than 2, or no more than 1 nucleotide from at least 17, at least 18, at least 19, or at least 20 contiguous nucleotides of the sequence (DNA-targeting segment) set forth in SEQ ID NO: 41.

TABLE 5
Human ALB Intron 1 Guide Sequences.

| Guide Sequence | SEQ ID NO: |
|---|---|
| GAGCAACCUCACUCUUGUCU | 30 |
| AUGCAUUUGUUUCAAAAUAU | 31 |
| UGCAUUUGUUUCAAAAUAUU | 32 |
| AUUUAUGAGAUCAACAGCAC | 33 |
| GAUCAACAGCACAGGUUUUG | 34 |
| UUAAAUAAAGCAUAGUGCAA | 35 |
| UAAAGCAUAGUGCAAUGGAU | 36 |
| UAGUGCAAUGGAUAGGUCUU | 37 |
| UACUAAAACUUUAUUUUACU | 38 |
| AAAGUUGAACAAUAGAAAAA | 39 |
| AAUGCAUAAUCUAAGUCAAA | 40 |
| UAAUAAAAUUCAAACAUCCU | 41 |
| GCAUCUUUAAAGAAUUAUUU | 42 |
| UUUGGCAUUUAUUUCUAAAA | 43 |
| UGUAUUUGUGAAGUCUUACA | 44 |
| UCCUAGGUAAAAAAAAAAAA | 45 |
| UAAUUUUCUUUUGCGCACUA | 46 |
| UGACUGAAACUUCACAGAAU | 47 |
| GACUGAAACUUCACAGAAUA | 48 |
| UUCAUUUUAGUCUGUCUUCU | 49 |
| AUUAUCUAAGUUUGAAUAUA | 50 |
| AAUUUUUAAAAUAGUAUUCU | 51 |
| UGAAUUAUUCUUCUGUUUAA | 52 |
| AUCAUCCUGAGUUUUUCUGU | 53 |
| UUACUAAAACUUUAUUUUAC | 54 |
| ACCUUUUUUUUUUUUUACCU | 55 |
| AGUGCAAUGGAUAGGUCUUU | 56 |
| UGAUUCCUACAGAAAAACUC | 57 |
| UGGGCAAGGGAAGAAAAAAA | 58 |
| CCUCACUCUUGUCUGGGCAA | 59 |
| ACCUCACUCUUGUCUGGGCA | 60 |
| UGAGCAACCUCACUCUUGUC | 61 |

TABLE 6
Human ALB Intron 1 sgRNA Sequences.

| Full Sequence | Full Sequence Modified |
|---|---|
| GAGCAACCUCACUCUUGUCUGUUU | mG*mA*mG*CAACCUCACUCUUGUCUGUUUUAGAmGmC |
| UAGAGCUAGAAAUAGCAAGUUAAA | mUmAmGmAmAmAmUmAmGmCAAGUUAAAAUAAGGCU |
| AUAAGGCUAGUCCGUUAUCAACUU | AGUCCGUUAUCAmAmCmUmUmGmAmAmAmAmAmGmU |
| GAAAAAGUGGCACCGAGUCGGUGC | mGmGmCmAmCmCmGmAmGmUmCmGmGmUmGmCmU*m |
| UUUU (SEQ ID NO: 62) | U*mU*mU (SEQ ID NO: 94) |
| AUGCAUUUGUUUCAAAAUAUGUUU | mA*mU*mG*CAUUUGUUUCAAAAUAUGUUUUAGAmGmC |
| UAGAGCUAGAAAUAGCAAGUUAAA | mUmAmGmAmAmAmUmAmGmCAAGUUAAAAUAAGGCU |
| AUAAGGCUAGUCCGUUAUCAACUU | AGUCCGUUAUCAmAmCmUmUmGmAmAmAmAmAmGmU |
| GAAAAAGUGGCACCGAGUCGGUGC | mGmGmCmAmCmCmGmAmGmUmCmGmGmUmGmCmU*m |
| UUUU (SEQ ID NO: 63) | U*mU*mU (SEQ ID NO: 95) |
| UGCAUUUGUUUCAAAAUAUUGUUU | mU*mG*mC*AUUUGUUUCAAAAUAUUGUUUUAGAmGmC |
| UAGAGCUAGAAAUAGCAAGUUAAA | mUmAmGmAmAmAmUmAmGmCAAGUUAAAAUAAGGCU |
| AUAAGGCUAGUCCGUUAUCAACUU | AGUCCGUUAUCAmAmCmUmUmGmAmAmAmAmAmGmU |
| GAAAAAGUGGCACCGAGUCGGUGC | mGmGmCmAmCmCmGmAmGmUmCmGmGmUmGmCmU*m |
| UUUU (SEQ ID NO: 64) | U*mU*mU (SEQ ID NO: 96) |
| AUUUAUGAGAUCAACAGCACGUUU | mA*mU*mU*UAUGAGAUCAACAGCACGUUUUAGAmGmC |
| UAGAGCUAGAAAUAGCAAGUUAAA | mUmAmGmAmAmAmUmAmGmCAAGUUAAAAUAAGGCU |
| AUAAGGCUAGUCCGUUAUCAACUU | AGUCCGUUAUCAmAmCmUmUmGmAmAmAmAmAmGmU |
| GAAAAAGUGGCACCGAGUCGGUGC | mGmGmCmAmCmCmGmAmGmUmCmGmGmUmGmCmU*m |
| UUUU (SEQ ID NO: 65) | U*mU*mU (SEQ ID NO: 97) |
| GAUCAACAGCACAGGUUUUGGUUU | mG*mA*mU*CAACAGCACAGGUUUUGGUUUUAGAmGmC |
| UAGAGCUAGAAAUAGCAAGUUAAA | mUmAmGmAmAmAmUmAmGmCAAGUUAAAAUAAGGCU |
| AUAAGGCUAGUCCGUUAUCAACUU | AGUCCGUUAUCAmAmCmUmUmGmAmAmAmAmAmGmU |
| GAAAAAGUGGCACCGAGUCGGUGC | mGmGmCmAmCmCmGmAmGmUmCmGmGmUmGmCmU*m |
| UUUU (SEQ ID NO: 66) | U*mU*mU (SEQ ID NO: 98) |
| UUAAAUAAAGCAUAGUGCAAGUUU | mU*mU*mA*AAUAAAGCAUAGUGCAAGUUUUAGAmGmC |
| UAGAGCUAGAAAUAGCAAGUUAAA | mUmAmGmAmAmAmUmAmGmCAAGUUAAAAUAAGGCU |
| AUAAGGCUAGUCCGUUAUCAACUU | AGUCCGUUAUCAmAmCmUmUmGmAmAmAmAmAmGmU |
| GAAAAAGUGGCACCGAGUCGGUGC | mGmGmCmAmCmCmGmAmGmUmCmGmGmUmGmCmU*m |
| UUUU (SEQ ID NO: 67) | U*mU*mU (SEQ ID NO: 99) |
| UAAAGCAUAGUGCAAUGGAUGUUU | mU*mA*mA*AGCAUAGUGCAAUGGAUGUUUUAGAmGmC |
| UAGAGCUAGAAAUAGCAAGUUAAA | mUmAmGmAmAmAmUmAmGmCAAGUUAAAAUAAGGCU |
| AUAAGGCUAGUCCGUUAUCAACUU | AGUCCGUUAUCAmAmCmUmUmGmAmAmAmAmAmGmU |
| GAAAAAGUGGCACCGAGUCGGUGC | mGmGmCmAmCmCmGmAmGmUmCmGmGmUmGmCmU*m |
| UUUU (SEQ ID NO: 68) | U*mU*mU (SEQ ID NO: 100) |
| UAGUGCAAUGGAUAGGUCUUGUUU | mU*mA*mG*UGCAAUGGAUAGGUCUUGUUUUAGAmGmC |
| UAGAGCUAGAAAUAGCAAGUUAAA | mUmAmGmAmAmAmUmAmGmCAAGUUAAAAUAAGGCU |
| AUAAGGCUAGUCCGUUAUCAACUU | AGUCCGUUAUCAmAmCmUmUmGmAmAmAmAmAmGmU |
| GAAAAAGUGGCACCGAGUCGGUGC | mGmGmCmAmCmCmGmAmGmUmCmGmGmUmGmCmU*m |
| UUUU (SEQ ID NO: 69) | U*mU*mU (SEQ ID NO: 101) |
| UACUAAAACUUUAUUUUACUGUUU | mU*mA*mC*UAAAACUUUAUUUUACUGUUUUAGAmGmC |
| UAGAGCUAGAAAUAGCAAGUUAAA | mUmAmGmAmAmAmUmAmGmCAAGUUAAAAUAAGGCU |
| AUAAGGCUAGUCCGUUAUCAACUU | AGUCCGUUAUCAmAmCmUmUmGmAmAmAmAmAmGmU |
| GAAAAAGUGGCACCGAGUCGGUGC | mGmGmCmAmCmCmGmAmGmUmCmGmGmUmGmCmU*m |
| UUUU (SEQ ID NO: 70) | U*mU*mU (SEQ ID NO: 102) |
| AAAGUUGAACAAUAGAAAAAGUUU | mA*mA*mA*GUUGAACAAUAGAAAAAGUUUUAGAmGmC |
| UAGAGCUAGAAAUAGCAAGUUAAA | mUmAmGmAmAmAmUmAmGmCAAGUUAAAAUAAGGCU |
| AUAAGGCUAGUCCGUUAUCAACUU | AGUCCGUUAUCAmAmCmUmUmGmAmAmAmAmAmGmU |
| GAAAAAGUGGCACCGAGUCGGUGC | mGmGmCmAmCmCmGmAmGmUmCmGmGmUmGmCmU*m |
| UUUU (SEQ ID NO: 71) | U*mU*mU (SEQ ID NO: 103) |
| AAUGCAUAAUCUAAGUCAAAGUUU | mA*mA*mU*GCAUAAUCUAAGUCAAAGUUUUAGAmGmC |
| UAGAGCUAGAAAUAGCAAGUUAAA | mUmAmGmAmAmAmUmAmGmCAAGUUAAAAUAAGGCU |
| AUAAGGCUAGUCCGUUAUCAACUU | AGUCCGUUAUCAmAmCmUmUmGmAmAmAmAmAmGmU |
| GAAAAAGUGGCACCGAGUCGGUGC | mGmGmCmAmCmCmGmAmGmUmCmGmGmUmGmCmU*m |
| UUUU (SEQ ID NO: 72) | U*mU*mU (SEQ ID NO: 104) |
| UAAUAAAAUUCAAACAUCCUGUUU | mU*mA*mA*UAAAAUUCAAACAUCCUGUUUUAGAmGmC |
| UAGAGCUAGAAAUAGCAAGUUAAA | mUmAmGmAmAmAmUmAmGmCAAGUUAAAAUAAGGCU |
| AUAAGGCUAGUCCGUUAUCAACUU | AGUCCGUUAUCAmAmCmUmUmGmAmAmAmAmAmGmU |
| GAAAAAGUGGCACCGAGUCGGUGC | mGmGmCmAmCmCmGmAmGmUmCmGmGmUmGmCmU*m |
| UUUU (SEQ ID NO: 73) | U*mU*mU (SEQ ID NO: 105) |
| GCAUCUUUAAAGAAUUAUUUGUUU | mG*mC*mA*UCUUUAAAGAAUUAUUUGUUUUAGAmGmC |
| UAGAGCUAGAAAUAGCAAGUUAAA | mUmAmGmAmAmAmUmAmGmCAAGUUAAAAUAAGGCU |
| AUAAGGCUAGUCCGUUAUCAACUU | AGUCCGUUAUCAmAmCmUmUmGmAmAmAmAmAmGmU |
| GAAAAAGUGGCACCGAGUCGGUGC | mGmGmCmAmCmCmGmAmGmUmCmGmGmUmGmCmU*m |
| UUUU (SEQ ID NO: 74) | U*mU*mU (SEQ ID NO: 106) |
| UUUGGCAUUUAUUUCUAAAAGUUU | mU*mU*mU*GGCAUUUAUUUCUAAAAGUUUUAGAmGmC |
| UAGAGCUAGAAAUAGCAAGUUAAA | mUmAmGmAmAmAmUmAmGmCAAGUUAAAAUAAGGCU |
| AUAAGGCUAGUCCGUUAUCAACUU | AGUCCGUUAUCAmAmCmUmUmGmAmAmAmAmAmGmU |
| GAAAAAGUGGCACCGAGUCGGUGC | mGmGmCmAmCmCmGmAmGmUmCmGmGmUmGmCmU*m |
| UUUU (SEQ ID NO: 75) | U*mU*mU (SEQ ID NO: 107) |
| UGUAUUUGUGAAGUCUUACAGUUU | mU*mG*mU*AUUUGUGAAGUCUUACAGUUUUAGAmGmC |
| UAGAGCUAGAAAUAGCAAGUUAAA | mUmAmGmAmAmAmUmAmGmCAAGUUAAAAUAAGGCU |
| AUAAGGCUAGUCCGUUAUCAACUU | AGUCCGUUAUCAmAmCmUmUmGmAmAmAmAmAmGmU |
| GAAAAAGUGGCACCGAGUCGGUGC | mGmGmCmAmCmCmGmAmGmUmCmGmGmUmGmCmU*m |
| UUUU (SEQ ID NO: 76) | U*mU*mU (SEQ ID NO: 108) |
| UCCUAGGUAAAAAAAAAAAAGUUU | mU*mC*mC*UAGGUAAAAAAAAAAAAGUUUUAGAmGmC |
| UAGAGCUAGAAAUAGCAAGUUAAA | mUmAmGmAmAmAmUmAmGmCAAGUUAAAAUAAGGCU |
| AUAAGGCUAGUCCGUUAUCAACUU | AGUCCGUUAUCAmAmCmUmUmGmAmAmAmAmAmGmU |
| GAAAAAGUGGCACCGAGUCGGUGC | mGmGmCmAmCmCmGmAmGmUmCmGmGmUmGmCmU*m |
| UUUU (SEQ ID NO: 77) | U*mU*mU (SEQ ID NO: 109) |
| UAAUUUUCUUUUGCGCACUAGUUU | mU*mA*mA*UUUUCUUUUGCGCACUAGUUUUAGAmGmC |
| UAGAGCUAGAAAUAGCAAGUUAAA | mUmAmGmAmAmAmUmAmGmCAAGUUAAAAUAAGGCU |
| AUAAGGCUAGUCCGUUAUCAACUU | AGUCCGUUAUCAmAmCmUmUmGmAmAmAmAmAmGmU |
| GAAAAAGUGGCACCGAGUCGGUGC | mGmGmCmAmCmCmGmAmGmUmCmGmGmUmGmCmU*m |
| UUUU (SEQ ID NO: 78) | U*mU*mU (SEQ ID NO: 110) |
| UGACUGAAACUUCACAGAAUGUUU | mU*mG*mA*CUGAAACUUCACAGAAUGUUUUAGAmGmC |
| UAGAGCUAGAAAUAGCAAGUUAAA | mUmAmGmAmAmAmUmAmGmCAAGUUAAAAUAAGGCU |
| AUAAGGCUAGUCCGUUAUCAACUU | AGUCCGUUAUCAmAmCmUmUmGmAmAmAmAmAmGmU |
| GAAAAAGUGGCACCGAGUCGGUGC | mGmGmCmAmCmCmGmAmGmUmCmGmGmUmGmCmU*m |
| UUUU (SEQ ID NO: 79) | U*mU*mU (SEQ ID NO: 111) |
| GACUGAAACUUCACAGAAUAGUUU | mG*mA*mC*UGAAACUUCACAGAAUAGUUUUAGAmGmC |
| UAGAGCUAGAAAUAGCAAGUUAAA | mUmAmGmAmAmAmUmAmGmCAAGUUAAAAUAAGGCU |
| AUAAGGCUAGUCCGUUAUCAACUU | AGUCCGUUAUCAmAmCmUmUmGmAmAmAmAmAmGmU |
| GAAAAAGUGGCACCGAGUCGGUGC | mGmGmCmAmCmCmGmAmGmUmCmGmGmUmGmCmU*m |
| UUUU (SEQ ID NO: 80) | U*mU*mU (SEQ ID NO: 112) |
| UUCAUUUUAGUCUGUCUUCUGUUU | mU*mU*mC*AUUUUAGUCUGUCUUCUGUUUUAGAmGmC |
| UAGAGCUAGAAAUAGCAAGUUAAA | mUmAmGmAmAmAmUmAmGmCAAGUUAAAAUAAGGCU |
| AUAAGGCUAGUCCGUUAUCAACUU | AGUCCGUUAUCAmAmCmUmUmGmAmAmAmAmAmGmU |
| GAAAAAGUGGCACCGAGUCGGUGC | mGmGmCmAmCmCmGmAmGmUmCmGmGmUmGmCmU*m |
| UUUU (SEQ ID NO: 81) | U*mU*mU (SEQ ID NO: 113) |
| AUUAUCUAAGUUUGAAUAUAGUUU | mA*mU*mU*AUCUAAGUUUGAAUAUAGUUUUAGAmGmC |
| UAGAGCUAGAAAUAGCAAGUUAAA | mUmAmGmAmAmAmUmAmGmCAAGUUAAAAUAAGGCU |
| AUAAGGCUAGUCCGUUAUCAACUU | AGUCCGUUAUCAmAmCmUmUmGmAmAmAmAmAmGmU |
| GAAAAAGUGGCACCGAGUCGGUGC | mGmGmCmAmCmCmGmAmGmUmCmGmGmUmGmCmU*m |
| UUUU (SEQ ID NO: 82) | U*mU*mU (SEQ ID NO: 114) |
| AAUUUUUAAAAUAGUAUUCUGUUU | mA*mA*mU*UUUUAAAAUAGUAUUCUGUUUUAGAmGmC |
| UAGAGCUAGAAAUAGCAAGUUAAA | mUmAmGmAmAmAmUmAmGmCAAGUUAAAAUAAGGCU |
| AUAAGGCUAGUCCGUUAUCAACUU | AGUCCGUUAUCAmAmCmUmUmGmAmAmAmAmAmGmU |
| GAAAAAGUGGCACCGAGUCGGUGC | mGmGmCmAmCmCmGmAmGmUmCmGmGmUmGmCmU*m |
| UUUU (SEQ ID NO: 83) | U*mU*mU (SEQ ID NO: 115) |
| UGAAUUAUUCUUCUGUUUAAGUUU | mU*mG*mA*AUUAUUCUUCUGUUUAAGUUUUAGAmGmC |
| UAGAGCUAGAAAUAGCAAGUUAAA | mUmAmGmAmAmAmUmAmGmCAAGUUAAAAUAAGGCU |
| AUAAGGCUAGUCCGUUAUCAACUU | AGUCCGUUAUCAmAmCmUmUmGmAmAmAmAmAmGmU |
| GAAAAAGUGGCACCGAGUCGGUGC | mGmGmCmAmCmCmGmAmGmUmCmGmGmUmGmCmU*m |
| UUUU (SEQ ID NO: 84) | U*mU*mU (SEQ ID NO: 116) |
| AUCAUCCUGAGUUUUUCUGUGUUU | mA*mU*mC*AUCCUGAGUUUUUCUGUGUUUUAGAmGmC |
| UAGAGCUAGAAAUAGCAAGUUAAA | mUmAmGmAmAmAmUmAmGmCAAGUUAAAAUAAGGCU |
| AUAAGGCUAGUCCGUUAUCAACUU | AGUCCGUUAUCAmAmCmUmUmGmAmAmAmAmAmGmU |
| GAAAAAGUGGCACCGAGUCGGUGC | mGmGmCmAmCmCmGmAmGmUmCmGmGmUmGmCmU*m |
| UUUU (SEQ ID NO: 85) | U*mU*mU (SEQ ID NO: 117) |
| UUACUAAAACUUUAUUUUACGUUU | mU*mU*mA*CUAAAACUUUAUUUUACGUUUUAGAmGmC |
| UAGAGCUAGAAAUAGCAAGUUAAA | mUmAmGmAmAmAmUmAmGmCAAGUUAAAAUAAGGCU |
| AUAAGGCUAGUCCGUUAUCAACUU | AGUCCGUUAUCAmAmCmUmUmGmAmAmAmAmAmGmU |
| GAAAAAGUGGCACCGAGUCGGUGC | mGmGmCmAmCmCmGmAmGmUmCmGmGmUmGmCmU*m |
| UUUU (SEQ ID NO: 86) | U*mU*mU (SEQ ID NO: 118) |
| ACCUUUUUUUUUUUUUACCUGUUU | mA*mC*mC*UUUUUUUUUUUUUACCUGUUUUAGAmGmC |
| UAGAGCUAGAAAUAGCAAGUUAAA | mUmAmGmAmAmAmUmAmGmCAAGUUAAAAUAAGGCU |
| AUAAGGCUAGUCCGUUAUCAACUU | AGUCCGUUAUCAmAmCmUmUmGmAmAmAmAmAmGmU |
| GAAAAAGUGGCACCGAGUCGGUGC | mGmGmCmAmCmCmGmAmGmUmCmGmGmUmGmCmU*m |
| UUUU (SEQ ID NO: 87) | U*mU*mU (SEQ ID NO: 119) |
| AGUGCAAUGGAUAGGUCUUUGUUU | mA*mG*mU*GCAAUGGAUAGGUCUUUGUUUUAGAmGmC |
| UAGAGCUAGAAAUAGCAAGUUAAA | mUmAmGmAmAmAmUmAmGmCAAGUUAAAAUAAGGCU |
| AUAAGGCUAGUCCGUUAUCAACUU | AGUCCGUUAUCAmAmCmUmUmGmAmAmAmAmAmGmU |
| GAAAAAGUGGCACCGAGUCGGUGC | mGmGmCmAmCmCmGmAmGmUmCmGmGmUmGmCmU*m |
| UUUU (SEQ ID NO: 88) | U*mU*mU (SEQ ID NO: 120) |
| UGAUUCCUACAGAAAAACUCGUUU | mU*mG*mA*UUCCUACAGAAAAACUCGUUUUAGAmGmC |
| UAGAGCUAGAAAUAGCAAGUUAAA | mUmAmGmAmAmAmUmAmGmCAAGUUAAAAUAAGGCU |
| AUAAGGCUAGUCCGUUAUCAACUU | AGUCCGUUAUCAmAmCmUmUmGmAmAmAmAmAmGmU |
| GAAAAAGUGGCACCGAGUCGGUGC | mGmGmCmAmCmCmGmAmGmUmCmGmGmUmGmCmU*m |
| UUUU (SEQ ID NO: 89) | U*mU*mU (SEQ ID NO: 121) |
| UGGGCAAGGGAAGAAAAAAAGUUU | mU*mG*mG*GCAAGGGAAGAAAAAAAGUUUUAGAmGmC |
| UAGAGCUAGAAAUAGCAAGUUAAA | mUmAmGmAmAmAmUmAmGmCAAGUUAAAAUAAGGCU |
| AUAAGGCUAGUCCGUUAUCAACUU | AGUCCGUUAUCAmAmCmUmUmGmAmAmAmAmAmGmU |
| GAAAAAGUGGCACCGAGUCGGUGC | mGmGmCmAmCmCmGmAmGmUmCmGmGmUmGmCmU*m |
| UUUU (SEQ ID NO: 90) | U*mU*mU (SEQ ID NO: 122) |
| CCUCACUCUUGUCUGGGCAAGUUU | mC*mC*mU*CACUCUUGUCUGGGCAAGUUUUAGAmGmC |
| UAGAGCUAGAAAUAGCAAGUUAAA | mUmAmGmAmAmAmUmAmGmCAAGUUAAAAUAAGGCU |
| AUAAGGCUAGUCCGUUAUCAACUU | AGUCCGUUAUCAmAmCmUmUmGmAmAmAmAmAmGmU |
| GAAAAAGUGGCACCGAGUCGGUGC | mGmGmCmAmCmCmGmAmGmUmCmGmGmUmGmCmU*m |
| UUUU (SEQ ID NO: 91) | U*mU*mU (SEQ ID NO: 123) |
| ACCUCACUCUUGUCUGGGCAGUUU | mA*mC*mC*UCACUCUUGUCUGGGCAGUUUUAGAmGmC |
| UAGAGCUAGAAAUAGCAAGUUAAA | mUmAmGmAmAmAmUmAmGmCAAGUUAAAAUAAGGCU |
| AUAAGGCUAGUCCGUUAUCAACUU | AGUCCGUUAUCAmAmCmUmUmGmAmAmAmAmAmGmU |
| GAAAAAGUGGCACCGAGUCGGUGC | mGmGmCmAmCmCmGmAmGmUmCmGmGmUmGmCmU*m |
| UUUU (SEQ ID NO: 92) | U*mU*mU (SEQ ID NO: 124) |
| UGAGCAACCUCACUCUUGUCGUUU | mU*mG*mA*GCAACCUCACUCUUGUCGUUUUAGAmGmC |
| UAGAGCUAGAAAUAGCAAGUUAAA | mUmAmGmAmAmAmUmAmGmCAAGUUAAAAUAAGGCU |
| AUAAGGCUAGUCCGUUAUCAACUU | AGUCCGUUAUCAmAmCmUmUmGmAmAmAmAmAmGmU |
| GAAAAAGUGGCACCGAGUCGGUGC | mGmGmCmAmCmCmGmAmGmUmCmGmGmUmGmCmU*m |
| UUUU (SEQ ID NO: 93) | U*mU*mU (SEQ ID NO: 125) |

TABLE 7
Mouse Alb Intron 1 Guide Sequences.

| Guide Sequence | SEQ ID NO: |
|---|---|
| CACUCUUGUCUGUGGAAACA | 164 |

TABLE 8
Mouse Alb Intron 1 sgRNA Sequences.

| Full Sequence | Full Sequence Modified |
|---|---|
| CACUCUUGUCUGUGGAAACAGUUU | mC*mA*mC*UCUUGUCUGUGGA |
| UAGAGCUAGAAAUAGCAAGUUAAA | AACAGUUUUAGAmGmCmUmAmG |
| AUAAGGCUAGUCCGUUAUCAACUU | mAmAmAmUmAmGmCAAGUUAAA |
| GAAAAAGUGGCACCGAGUCGGUGC | AUAAGGCUAGUCCGUUAUCAmA |
| UUUU (SEQ ID NO: 166) | mCmUmUmGmAmAmAmAmAmGmU |
| | mGmGmCmAmCmCmGmAmGmUmC |
| | mGmGmUmGmCmU*mU*mU*mU |
| | (SEQ ID NO: 167) |

[0510] TracrRNAs can be in any form (e.g., full-length tracrRNAs or active partial tracrRNAs) and of varying lengths. They can include primary transcripts or processed forms. For example, tracrRNAs (as part of a single-guide RNA or as a separate molecule as part of a two-molecule gRNA) may comprise, consist essentially of, or consist of all or a portion of a wild type tracrRNA sequence (e.g., about or more than about 20, 26, 32, 45, 48, 54, 63, 67, 85, or more nucleotides of a wild type tracrRNA sequence). Examples of wild type tracrRNA sequences from S. pyogenes include 171-nucleotide, 89-nucleotide, 75-nucleotide, and 65-nucleotide versions. See, e.g., Deltcheva et al. (2011) Nature 471(7340):602-607; WO 2014/093661, each of which is herein incorporated by reference in its entirety for all purposes. Examples of tracrRNAs within single-guide RNAs (sgRNAs) include the tracrRNA segments found within +48, +54, +67, and +85 versions of sgRNAs, where “+n” indicates that up to the +n nucleotide of wild type tracrRNA is included in the sgRNA. See U.S. Pat. No. 8,697,359, herein incorporated by reference in its entirety for all purposes.

[0511] The percent complementarity between the DNA-targeting segment of the guide RNA and the complementary strand of the target DNA can be at least 60% (e.g., at least 65%, at least 70%, at least 75%, at least 80%, at least 85%, at least 90%, at least 95%, or 100%). The percent complementarity between the DNA-targeting segment and the complementary strand of the target DNA can be at least 60% over about 20 contiguous nucleotides. As an example, the percent complementarity between the DNA-targeting segment and the complementary strand of the target DNA can be 100% over the 14 contiguous nucleotides at the 5′ end of the complementary strand of the target DNA and as low as 0% over the remainder. In such a case, the DNA-targeting segment can be considered to be 14 nucleotides in length. As another example, the percent complementarity between the DNA-targeting segment and the complementary strand of the target DNA can be 100% over the seven contiguous nucleotides at the 5′ end of the complementary strand of the target DNA and as low as 0% over the remainder. In such a case, the DNA-targeting segment can be considered to be 7 nucleotides in length. In some guide RNAs, at least 17 nucleotides within the DNA-targeting segment are complementary to the complementary strand of the target DNA. For example, the DNA-targeting segment can be 20 nucleotides in length and can comprise 1, 2, or 3 mismatches with the complementary strand of the target DNA. In one example, the mismatches are not adjacent to the region of the complementary strand corresponding to the protospacer adjacent motif (PAM) sequence (i.e., the reverse complement of the PAM sequence) (e.g., the mismatches are in the 5′ end of the DNA-targeting segment of the guide RNA, or the mismatches are at least 2, 3, 4, 5, 6, 7, 8, 9, 10, 11, 12, 13, 14, 15, 16, 17, 18, or 19 base pairs away from the region of the complementary strand corresponding to the PAM sequence).

[0512] The protein-binding segment of a gRNA can comprise two stretches of nucleotides that are complementary to one another. The complementary nucleotides of the protein-binding segment hybridize to form a double-stranded RNA duplex (dsRNA). The protein-binding segment of a subject gRNA interacts with a Cas protein, and the gRNA directs the bound Cas protein to a specific nucleotide sequence within target DNA via the DNA-targeting segment.

[0513] Single-guide RNAs can comprise a DNA-targeting segment and a scaffold sequence (i.e., the protein-binding or Cas-binding sequence of the guide RNA). For example, such guide RNAs can have a 5′ DNA-targeting segment joined to a 3′ scaffold sequence. Exemplary scaffold sequences (e.g., for use with S. pyogenes Cas9) comprise, consist essentially of, or consist of: GUUUUAGAGCUAGAAAUAGCAAGUUAAAAUAAGGCUAGUCCGUUAUCAACUUGA AAAAGUGGCACCGAGUCGGUGCU (version 1; SEQ ID NO: 21); GUUGGAACCAUUCAAAACAGCAUAGCAAGUUAAAAUAAGGCUAGUCCGUUAUCA ACUUGAAAAAGUGGCACCGAGUCGGUGC (version 2; SEQ ID NO: 22); GUUUUAGAGCUAGAAAUAGCAAGUUAAAAUAAGGCUAGUCCGUUAUCAACUUGA AAAAGUGGCACCGAGUCGGUGC (version 3; SEQ ID NO: 23); and GUUUAAGAGCUAUGCUGGAAACAGCAUAGCAAGUUUAAAUAAGGCUAGUCCGUU AUCAACUUGAAAAAGUGGCACCGAGUCGGUGC (version 4; SEQ ID NO: 24); GUUUUAGAGCUAGAAAUAGCAAGUUAAAAUAAGGCUAGUCCGUUAUCAACUUGA AAAAGUGGCACCGAGUCGGUGCUUUUUUU (version 5; SEQ ID NO: 25); GUUUUAGAGCUAGAAAUAGCAAGUUAAAAUAAGGCUAGUCCGUUAUCAACUUGA AAAAGUGGCACCGAGUCGGUGCUUUU (version 6; SEQ ID NO: 26); GUUUAAGAGCUAUGCUGGAAACAGCAUAGCAAGUUUAAAUAAGGCUAGUCCGUU AUCAACUUGAAAAAGUGGCACCGAGUCGGUGCUUUUUU (version 7; SEQ ID NO: 27); or GUUUUAGAGCUAGAAAUAGCAAGUUAAAAUAAGGCUAGUCCGUUAUCAACUUGG CACCGAGUCGGUGC (version 8; SEQ ID NO: 28). In some guide sgRNAs, the four terminal U residues of version 6 are not present. In some sgRNAs, only 1, 2, or 3 of the four terminal U residues of version 6 are present. Guide RNAs targeting any of the guide RNA target sequences disclosed herein can include, for example, a DNA-targeting segment on the 5′ end of the guide RNA fused to any of the exemplary guide RNA scaffold sequences on the 3′ end of the guide RNA. That is, any of the DNA-targeting segments disclosed herein can be joined to the 5′ end of any one of the above scaffold sequences to form a single guide RNA (chimeric guide RNA).

[0514] Guide RNAs can include modifications or sequences that provide for additional desirable features (e.g., modified or regulated stability; subcellular targeting; tracking with a fluorescent label; a binding site for a protein or protein complex; and the like). That is, guide RNAs can include one or more modified nucleosides or nucleotides, or one or more non-naturally and/or naturally occurring components or configurations that are used instead of or in addition to the canonical A, G, C, and U residues. Examples of such modifications include, for example, a 5′ cap (e.g., a 7-methylguanylate cap (m7G)); a 3′ polyadenylated tail (i.e., a 3′ poly(A) tail); a riboswitch sequence (e.g., to allow for regulated stability and/or regulated accessibility by proteins and/or protein complexes); a stability control sequence; a sequence that forms a dsRNA duplex (i.e., a hairpin); a modification or sequence that targets the RNA to a subcellular location (e.g., nucleus, mitochondria, chloroplasts, and the like); a modification or sequence that provides for tracking (e.g., direct conjugation to a fluorescent molecule, conjugation to a moiety that facilitates fluorescent detection, a sequence that allows for fluorescent detection, and so forth); a modification or sequence that provides a binding site for proteins (e.g., proteins that act on DNA, including transcriptional activators, transcriptional repressors, DNA methyltransferases, DNA demethylases, histone acetyltransferases, histone deacetylases, and the like); and combinations thereof. Other examples of modifications include engineered stem loop duplex structures, engineered bulge regions, engineered hairpins 3′ of the stem loop duplex structure, or any combination thereof. See, e.g., US 2015/0376586, herein incorporated by reference in its entirety for all purposes. A bulge can be an unpaired region of nucleotides within the duplex made up of the crRNA-like region and the minimum tracrRNA-like region. A bulge can comprise, on one side of the duplex, an unpaired 5′-XXXY-3′ where X is any purine and Y can be a nucleotide that can form a wobble pair with a nucleotide on the opposite strand, and an unpaired nucleotide region on the other side of the duplex.

[0515] Guide RNAs can comprise modified nucleosides and modified nucleotides including, for example, one or more of the following: (1) alteration or replacement of one or both of the non-linking phosphate oxygens and/or of one or more of the linking phosphate oxygens in the phosphodiester backbone linkage (an exemplary backbone modification); (2) alteration or replacement of a constituent of the ribose sugar such as alteration or replacement of the 2′ hydroxyl on the ribose sugar (an exemplary sugar modification); (3) replacement (e.g., wholesale replacement) of the phosphate moiety with dephospho linkers (an exemplary backbone modification); (4) modification or replacement of a naturally occurring nucleobase, including with a non-canonical nucleobase (an exemplary base modification); (5) replacement or modification of the ribose-phosphate backbone (an exemplary backbone modification); (6) modification of the 3′ end or 5′ end of the oligonucleotide (e.g., removal, modification or replacement of a terminal phosphate group or conjugation of a moiety, cap, or linker (such 3′ or 5′ cap modifications may comprise a sugar and/or backbone modification); and (7) modification or replacement of the sugar (an exemplary sugar modification). Other possible guide RNA modifications include modifications of or replacement of uracils or poly-uracil tracts. See, e.g., WO 2015/048577 and US 2016/0237455, each of which is herein incorporated by reference in its entirety for all purposes. Similar modifications can be made to Cas-encoding nucleic acids, such as Cas mRNAs. For example, Cas mRNAs can be modified by depletion of uridine using synonymous codons.

[0516] Chemical modifications such at hose listed above can be combined to provide modified gRNAs and/or mRNAs comprising residues (nucleosides and nucleotides) that can have two, three, four, or more modifications. For example, a modified residue can have a modified sugar and a modified nucleobase. In one example, every base of a gRNA is modified (e.g., all bases have a modified phosphate group, such as a phosphorothioate group). For example, all or substantially all of the phosphate groups of a gRNA can be replaced with phosphorothioate groups. Alternatively, or additionally, a modified gRNA can comprise at least one modified residue at or near the 5′ end. Alternatively, or additionally, a modified gRNA can comprise at least one modified residue at or near the 3′ end.

[0517] Some gRNAs comprise one, two, three or more modified residues. For example, at least 5%, at least 10%, at least 15%, at least 20%, at least 25%, at least 30%, at least 35%, at least 40%, at least 45%, at least 50%, at least 55%, at least 60%, at least 65%, at least 70%, at least 75%, at least 80%, at least 85%, at least 90%, at least 95%, or 100% of the positions in a modified gRNA can be modified nucleosides or nucleotides.

[0518] Unmodified nucleic acids can be prone to degradation. Exogenous nucleic acids can also induce an innate immune response. Modifications can help introduce stability and reduce immunogenicity. Some gRNAs described herein can contain one or more modified nucleosides or nucleotides to introduce stability toward intracellular or serum-based nucleases. Some modified gRNAs described herein can exhibit a reduced innate immune response when introduced into a population of cells.

[0519] The gRNAs disclosed herein can comprise a backbone modification in which the phosphate group of a modified residue can be modified by replacing one or more of the oxygens with a different substituent. The modification can include the wholesale replacement of an unmodified phosphate moiety with a modified phosphate group as described herein. Backbone modifications of the phosphate backbone can also include alterations that result in either an uncharged linker or a charged linker with unsymmetrical charge distribution.

[0520] Examples of modified phosphate groups include, phosphorothioate, phosphoroselenates, borano phosphates, borano phosphate esters, hydrogen phosphonates, phosphoroamidates, alkyl or aryl phosphonates and phosphotriesters. The phosphorous atom in an unmodified phosphate group is achiral. However, replacement of one of the non-bridging oxygens with one of the above atoms or groups of atoms can render the phosphorous atom chiral. The stereogenic phosphorous atom can possess either the “R” configuration (Rp) or the “S” configuration (Sp). The backbone can also be modified by replacement of a bridging oxygen, (i.e., the oxygen that links the phosphate to the nucleoside), with nitrogen (bridged phosphoroamidates), sulfur (bridged phosphorothioates) and carbon (bridged methylenephosphonates). The replacement can occur at either linking oxygen or at both of the linking oxygens.

[0521] The phosphate group can be replaced by non-phosphorus containing connectors in certain backbone modifications. In some embodiments, the charged phosphate group can be replaced by a neutral moiety. Examples of moieties which can replace the phosphate group can include, without limitation, e.g., methyl phosphonate, hydroxylamino, siloxane, carbonate, carboxymethyl, carbamate, amide, thioether, ethylene oxide linker, sulfonate, sulfonamide, thioformacetal, formacetal, oxime, methyleneimino, methylenemethylimino, methylenehydrazo, methylenedimethylhydrazo and methyleneoxymethylimino.

[0522] Scaffolds that can mimic nucleic acids can also be constructed wherein the phosphate linker and ribose sugar are replaced by nuclease resistant nucleoside or nucleotide surrogates. Such modifications may comprise backbone and sugar modifications. In some embodiments, the nucleobases can be tethered by a surrogate backbone. Examples can include, without limitation, the morpholino, cyclobutyl, pyrrolidine and peptide nucleic acid (PNA) nucleoside surrogates.

[0523] The modified nucleosides and modified nucleotides can include one or more modifications to the sugar group (a sugar modification). For example, the 2′ hydroxyl group (OH) can be modified (e.g., replaced with a number of different oxy or deoxy substituents. Modifications to the 2′ hydroxyl group can enhance the stability of the nucleic acid since the hydroxyl can no longer be deprotonated to form a 2′-alkoxide ion.

[0524] Examples of 2′ hydroxyl group modifications can include alkoxy or aryloxy (OR, wherein “R” can be, e.g., alkyl, cycloalkyl, aryl, aralkyl, heteroaryl or a sugar); polyethyleneglycols (PEG), O(CH₂CH₂O),CH₂CH₂OR wherein R can be, e.g., H or optionally substituted alkyl, and n can be an integer from 0 to 20 (e.g., from 0 to 4, from 0 to 8, from 0 to 10, from 0 to 16, from 1 to 4, from 1 to 8, from 1 to 10, from 1 to 16, from 1 to 20, from 2 to 4, from 2 to 8, from 2 to 10, from 2 to 16, from 2 to 20, from 4 to 8, from 4 to 10, from 4 to 16, and from 4 to 20). The 2′ hydroxyl group modification can be 2′-O-Me. Likewise, the 2′ hydroxyl group modification can be a 2′-fluoro modification, which replaces the 2′ hydroxyl group with a fluoride. The 2′ hydroxyl group modification can include locked nucleic acids (LNA) in which the 2′ hydroxyl can be connected, e.g., by a C1-6 alkylene or C1.6 heteroalkylene bridge, to the 4′ carbon of the same ribose sugar, where exemplary bridges can include methylene, propylene, ether, or amino bridges; O-amino (wherein amino can be, e.g., NH₂; alkylamino, dialkylamino, heterocyclyl, arylamino, diarylamino, heteroarylamino, or diheteroarylamino, ethylenediamine, or polyamino) and aminoalkoxy, O(CH₂)n-amino, (wherein amino can be, e.g., NH₂; alkylamino, dialkylamino, heterocyclyl, arylamino, diarylamino, heteroarylamino, or diheteroarylamino, ethylenediamine, or polyamino). The 2′ hydroxyl group modification can include unlocked nucleic acids (UNA) in which the ribose ring lacks the C2′—C3′ bond. The 2′ hydroxyl group modification can include the methoxyethyl group (MOE), (OCH₂CH₂OCH₃, e.g., a PEG derivative).

[0525] Deoxy 2′ modifications can include hydrogen (i.e. deoxyribose sugars, e.g., at the overhang portions of partially dsRNA); halo (e.g., bromo, chloro, fluoro, or iodo); amino (wherein amino can be, e.g., NH2; alkylamino, dialkylamino, heterocyclyl, arylamino, diarylamino, heteroarylamino, diheteroarylamino, or amino acid); NH(CH₂CH₂NH)ₙCH₂CH₂-amino (wherein amino can be, e.g., as described herein), —NHC(O)R (wherein R can be, e.g., alkyl, cycloalkyl, aryl, aralkyl, heteroaryl or sugar), cyano; mercapto; alkyl-thio-alkyl; thioalkoxy; and alkyl, cycloalkyl, aryl, alkenyl and alkynyl, which may be optionally substituted with e.g., an amino as described herein.

[0526] The sugar modification can comprise a sugar group which may also contain one or more carbons that possess the opposite stereochemical configuration than that of the corresponding carbon in ribose. Thus, a modified nucleic acid can include nucleotides containing e.g., arabinose, as the sugar. The modified nucleic acids can also include abasic sugars. These abasic sugars can also be further modified at one or more of the constituent sugar atoms. The modified nucleic acids can also include one or more sugars that are in the L form (e.g., L-nucleosides).

[0527] The modified nucleosides and modified nucleotides described herein, which can be incorporated into a modified nucleic acid, can include a modified base, also called a nucleobase. Examples of nucleobases include, but are not limited to, adenine (A), guanine (G), cytosine (C), and uracil (U). These nucleobases can be modified or wholly replaced to provide modified residues that can be incorporated into modified nucleic acids. The nucleobase of the nucleotide can be independently selected from a purine, a pyrimidine, a purine analog, or pyrimidine analog. In some embodiments, the nucleobase can include, for example, naturally-occurring and synthetic derivatives of a base.

[0528] In a dual guide RNA, each of the crRNA and the tracrRNA can contain modifications. Such modifications may be at one or both ends of the crRNA and/or tracrRNA. In a sgRNA, one or more residues at one or both ends of the sgRNA may be chemically modified, and/or internal nucleosides may be modified, and/or the entire sgRNA may be chemically modified. Some gRNAs comprise a 5′ end modification. Some gRNAs comprise a 3′ end modification.

[0529] The guide RNAs disclosed herein can comprise one of the modification patterns disclosed in WO 2018/107028 A1, herein incorporated by reference in its entirety for all purposes. The guide RNAs disclosed herein can also comprise one of the structures/modification patterns disclosed in US 2017/0114334, herein incorporated by reference in its entirety for all purposes. The guide RNAs disclosed herein can also comprise one of the structures/modification patterns disclosed in WO 2017/136794, WO 2017/004279, US 2018/0187186, or US 2019/0048338, each of which is herein incorporated by reference in its entirety for all purposes.

[0530] As one example, nucleotides at the 5′ or 3′ end of a guide RNA can include phosphorothioate linkages (e.g., the bases can have a modified phosphate group that is a phosphorothioate group). For example, a guide RNA can include phosphorothioate linkages between the 2, 3, or 4 terminal nucleotides at the 5′ or 3′ end of the guide RNA. As another example, nucleotides at the 5′ and/or 3′ end of a guide RNA can have 2′-O-methyl modifications. For example, a guide RNA can include 2′-O-methyl modifications at the 2, 3, or 4 terminal nucleotides at the 5′ and/or 3′ end of the guide RNA (e.g., the 5′ end). See, e.g., WO 2017/173054 A1 and Finn et al. (2018) Cell Rep. 22(9):2227-2235, each of which is herein incorporated by reference in its entirety for all purposes. Other possible modifications are described in more detail elsewhere herein. In a specific example, a guide RNA includes 2′-O-methyl analogs and 3′ phosphorothioate internucleotide linkages at the first three 5′ and 3′ terminal RNA residues. Such chemical modifications can, for example, provide greater stability and protection from exonucleases to guide RNAs, allowing them to persist within cells for longer than unmodified guide RNAs. Such chemical modifications can also, for example, protect against innate intracellular immune responses that can actively degrade RNA or trigger immune cascades that lead to cell death.

[0531] As one example, any of the guide RNAs described herein can comprise at least one modification. In one example, the at least one modification comprises a 2′-O-methyl (2′-O-Me) modified nucleotide, a phosphorothioate (PS) bond between nucleotides, a 2′-fluoro (2′-F) modified nucleotide, or a combination thereof. For example, the at least one modification can comprise a 2′-O-methyl (2′-O-Me) modified nucleotide. Alternatively, or additionally, the at least one modification can comprise a phosphorothioate (PS) bond between nucleotides. Alternatively, or additionally, the at least one modification can comprise a 2′-fluoro (2′-F) modified nucleotide. In one example, a guide RNA described herein comprises one or more 2′-O-methyl (2′-O-Me) modified nucleotides and one or more phosphorothioate (PS) bonds between nucleotides.

[0532] The modifications can occur anywhere in the guide RNA. As one example, the guide RNA comprises a modification at one or more of the first five nucleotides at the 5′ end of the guide RNA, the guide RNA comprises a modification at one or more of the last five nucleotides of the 3′ end of the guide RNA, or a combination thereof. For example, the guide RNA can comprise phosphorothioate bonds between the first four nucleotides of the guide RNA, phosphorothioate bonds between the last four nucleotides of the guide RNA, or a combination thereof. Alternatively, or additionally, the guide RNA can comprise 2′-O-Me modified nucleotides at the first three nucleotides at the 5′ end of the guide RNA, can comprise 2′-O-Me modified nucleotides at the last three nucleotides at the 3′ end of the guide RNA, or a combination thereof.

[0533] In one example, a modified gRNA can comprise the following sequence: mN*mN*mN*NNNNNNNNNNNNNNNNNGUUUUAGAmGmCmUmAmGmAmAmAmUmA mGmCAAGUUAAAAUAAGGCUAGUCCGUUAUCAmAmCmUmUmGmAmAmAmAmAm GmUmGmGmCmAmCmCmGmAmGmUmCmGmGmUmGmCmU*mU*mU*mU (SEQ ID NO: 29), where “N” may be any natural or non-natural nucleotide. For example, the totality of N residues comprise a human ALB intron 1 DNA-targeting segment as described herein (e.g., the sequence set forth in SEQ ID NO: 29, wherein the N residues are replaced with the DNA-targeting segment of any one of SEQ ID NOS: 30-61, the DNA-targeting segment of any one of SEQ ID NOS: 36, 30, 33, and 41, or the DNA-targeting segment of SEQ ID NO: 36. For example, a modified gRNA can comprise the sequence set forth in any one of SEQ ID NOS: 94-125, the sequence set forth in any one of SEQ ID NOS: 100, 94, 97, and 105, or the sequence set forth in SEQ ID NO: 100 in Table 6. The terms “mA,” “mC,” “mU,” and “mG” denote a nucleotide (A, C, U, and G, respectively) that has been modified with 2′-O-Me. The symbol “*” depicts a phosphorothioate modification. In certain embodiments, A, C, G, U, and N independently denote a ribose sugar, i.e., 2′-OH. In certain embodiments in the context of a modified sequence, A, C, G, U, and N denote a ribose sugar, i.e., 2′-OH. A phosphorothioate linkage or bond refers to a bond where a sulfur is substituted for one nonbridging phosphate oxygen in a phosphodiester linkage, for example, in the bonds between nucleotides bases. When phosphorothioates are used to generate oligonucleotides, the modified oligonucleotides may also be referred to as S-oligos. The terms A*, C*, U*, or G* denote a nucleotide that is linked to the next (e.g., 3′) nucleotide with a phosphorothioate bond. The terms “mA*,” “mC*,” “mU*,” and “mG*” denote a nucleotide (A, C, U, and G, respectively) that has been substituted with 2′-O-Me and that is linked to the next (e.g., 3′) nucleotide with a phosphorothioate bond.

[0534] Another chemical modification that has been shown to influence nucleotide sugar rings is halogen substitution. For example, 2′-fluoro (2′-F) substitution on nucleotide sugar rings can increase oligonucleotide binding affinity and nuclease stability. Abasic nucleotides refer to those which lack nitrogenous bases. Inverted bases refer to those with linkages that are inverted from the normal 5′ to 3′ linkage (i.e., either a 5′ to 5′ linkage or a 3′ to 3′ linkage).

[0535] An abasic nucleotide can be attached with an inverted linkage. For example, an abasic nucleotide may be attached to the terminal 5′ nucleotide via a 5′ to 5′ linkage, or an abasic nucleotide may be attached to the terminal 3′ nucleotide via a 3′ to 3′ linkage. An inverted abasic nucleotide at either the terminal 5′ or 3′ nucleotide may also be called an inverted abasic end cap.

[0536] In one example, one or more of the first three, four, or five nucleotides at the 5′ terminus, and one or more of the last three, four, or five nucleotides at the 3′ terminus are modified. The modification can be, for example, a 2′-O-Me, 2′-F, inverted abasic nucleotide, phosphorothioate bond, or other nucleotide modification well known to increase stability and/or performance.

[0537] In another example, the first four nucleotides at the 5′ terminus, and the last four nucleotides at the 3′ terminus can be linked with phosphorothioate bonds.

[0538] In another example, the first three nucleotides at the 5′ terminus, and the last three nucleotides at the 3′ terminus can comprise a 2′-O-methyl (2′-O-Me) modified nucleotide. In another example, the first three nucleotides at the 5′ terminus, and the last three nucleotides at the 3′ terminus comprise a 2′-fluoro (2′-F) modified nucleotide. In another example, the first three nucleotides at the 5′ terminus, and the last three nucleotides at the 3′ terminus comprise an inverted abasic nucleotide.

[0539] Guide RNAs can be provided in any form. For example, the gRNA can be provided in the form of RNA, either as two molecules (separate crRNA and tracrRNA) or as one molecule (sgRNA), and optionally in the form of a complex with a Cas protein. The gRNA can also be provided in the form of DNA encoding the gRNA. The DNA encoding the gRNA can encode a single RNA molecule (sgRNA) or separate RNA molecules (e.g., separate crRNA and tracrRNA). In the latter case, the DNA encoding the gRNA can be provided as one DNA molecule or as separate DNA molecules encoding the crRNA and tracrRNA, respectively.

[0540] When a gRNA is provided in the form of DNA, the gRNA can be transiently, conditionally, or constitutively expressed in the cell. DNAs encoding gRNAs can be stably integrated into the genome of the cell and operably linked to a promoter active in the cell. Alternatively, DNAs encoding gRNAs can be operably linked to a promoter in an expression construct. For example, the DNA encoding the gRNA can be in a vector comprising a heterologous nucleic acid, such as a nucleic acid encoding a Cas protein. Alternatively, it can be in a vector or a plasmid that is separate from the vector comprising the nucleic acid encoding the Cas protein. Promoters that can be used in such expression constructs include promoters active, for example, in one or more of a eukaryotic cell, a human cell, a non-human cell, a mammalian cell, a non-human mammalian cell, a rodent cell, a mouse cell, a rat cell, a pluripotent cell, an embryonic stem (ES) cell, an adult stem cell, a developmentally restricted progenitor cell, an induced pluripotent stem (iPS) cell, or a one-cell stage embryo. Such promoters can be, for example, conditional promoters, inducible promoters, constitutive promoters, or tissue-specific promoters. Such promoters can also be, for example, bidirectional promoters. Specific examples of suitable promoters include an RNA polymerase III promoter, such as a human U6 promoter, a rat U6 polymerase III promoter, or a mouse U6 polymerase III promoter.

[0541] Alternatively, gRNAs can be prepared by various other methods. For example, gRNAs can be prepared by in vitro transcription using, for example, T7 RNA polymerase (see, e.g., WO 2014/089290 and WO 2014/065596, each of which is herein incorporated by reference in its entirety for all purposes). Guide RNAs can also be a synthetically produced molecule prepared by chemical synthesis. For example, a guide RNA can be chemically synthesized to include 2′-O-methyl analogs and 3′ phosphorothioate internucleotide linkages at the first three 5′ and 3′ terminal RNA residues.

[0542] Guide RNAs (or nucleic acids encoding guide RNAs) can be in compositions comprising one or more guide RNAs (e.g., 1, 2, 3, 4, or more guide RNAs) and a carrier increasing the stability of the guide RNA (e.g., prolonging the period under given conditions of storage (e.g., −20° C., 4° C., or ambient temperature) for which degradation products remain below a threshold, such below 0.5% by weight of the starting nucleic acid or protein; or increasing the stability in vivo). Non-limiting examples of such carriers include poly(lactic acid) (PLA) microspheres, poly(D,L-lactic-coglycolic-acid) (PLGA) microspheres, liposomes, micelles, inverse micelles, lipid cochleates, and lipid microtubules. Such compositions can further comprise a Cas protein, such as a Cas9 protein, or a nucleic acid encoding a Cas protein.

[0543] As one example, a guide RNA targeting intron 1 of a human ALB gene can comprise, consist essentially of, or consist of the sequence set forth in any one of SEQ ID NOS: 62-125. Alternatively, a guide RNA targeting intron 1 of a human ALB gene can comprise, consist essentially of, or consist of a sequence that is at least 75%, at least 80%, at least 85%, at least 90%, or at least 95% identical to the DNA-targeting segment set forth in any one of SEQ ID NOS: 62-125. Alternatively, a guide RNA targeting intron 1 of a human ALB gene can comprise, consist essentially of, or consist of a sequence that is at least 90% or at least 95% identical to the DNA-targeting segment set forth in any one of SEQ ID NOS: 62-125. Alternatively, a guide RNA targeting intron 1 of a human ALB gene can comprise, consist essentially of, or consist of a sequence that differs by no more than 3, no more than 2, or no more than 1 nucleotide from the sequence set forth in any one of SEQ ID NOS: 62-125.

[0544] As another example, a guide RNA targeting intron 1 of a human ALB gene can comprise, consist essentially of, or consist of the sequence set forth in any one of SEQ ID NOS: 68, 100, 62, 94, 65, 97, 73, and 105. Alternatively, a guide RNA targeting intron 1 of a human ALB gene can comprise, consist essentially of, or consist of a sequence that is at least 75%, at least 80%, at least 85%, at least 90%, or at least 95% identical to the DNA-targeting segment set forth in any one of SEQ ID NOS: 68, 100, 62, 94, 65, 97, 73, and 105. Alternatively, a guide RNA targeting intron 1 of a human ALB gene can comprise, consist essentially of, or consist of a sequence that is at least 90% or at least 95% identical to the DNA-targeting segment set forth in any one of SEQ ID NOS: 68, 100, 62, 94, 65, 97, 73, and 105. Alternatively, a guide RNA targeting intron 1 of a human ALB gene can comprise, consist essentially of, or consist of a sequence that differs by no more than 3, no more than 2, or no more than 1 nucleotide from the sequence set forth in any one of SEQ ID NOS: 68, 100, 62, 94, 65, 97, 73, and 105.

[0545] As another example, a guide RNA targeting intron 1 of a human ALB gene can comprise, consist essentially of, or consist of the sequence set forth in SEQ ID NO: 68 or 100. Alternatively, a guide RNA targeting intron 1 of a human ALB gene can comprise, consist essentially of, or consist of a sequence that is at least 75%, at least 80%, at least 85%, at least 90%, or at least 95% identical to the DNA-targeting segment set forth in SEQ ID NO: 68 or 100. Alternatively, a guide RNA targeting intron 1 of a human ALB gene can comprise, consist essentially of, or consist of a sequence that is at least 90% or at least 95% identical to the DNA-targeting segment set forth in SEQ ID NO: 68 or 100. Alternatively, a guide RNA targeting intron 1 of a human ALB gene can comprise, consist essentially of, or consist of a sequence that differs by no more than 3, no more than 2, or no more than 1 nucleotide from the sequence set forth in SEQ ID NO: 68 or 100.

[0546] As another example, a guide RNA targeting intron 1 of a human ALB gene can comprise, consist essentially of, or consist of the sequence set forth in SEQ ID NO: 62 or 94. Alternatively, a guide RNA targeting intron 1 of a human ALB gene can comprise, consist essentially of, or consist of a sequence that is at least 75%, at least 80%, at least 85%, at least 90%, or at least 95% identical to the DNA-targeting segment set forth in SEQ ID NO: 62 or 94. Alternatively, a guide RNA targeting intron 1 of a human ALB gene can comprise, consist essentially of, or consist of a sequence that is at least 90% or at least 95% identical to the DNA-targeting segment set forth in SEQ ID NO: 62 or 94. Alternatively, a guide RNA targeting intron 1 of a human ALB gene can comprise, consist essentially of, or consist of a sequence that differs by no more than 3, no more than 2, or no more than 1 nucleotide from the sequence set forth in SEQ ID NO: 62 or 94.

[0547] As another example, a guide RNA targeting intron 1 of a human ALB gene can comprise, consist essentially of, or consist of the sequence set forth in SEQ ID NO: 65 or 97. Alternatively, a guide RNA targeting intron 1 of a human ALB gene can comprise, consist essentially of, or consist of a sequence that is at least 75%, at least 80%, at least 85%, at least 90%, or at least 95% identical to the DNA-targeting segment set forth in SEQ ID NO: 65 or 97. Alternatively, a guide RNA targeting intron 1 of a human ALB gene can comprise, consist essentially of, or consist of a sequence that is at least 90% or at least 95% identical to the DNA-targeting segment set forth in SEQ ID NO: 65 or 97. Alternatively, a guide RNA targeting intron 1 of a human ALB gene can comprise, consist essentially of, or consist of a sequence that differs by no more than 3, no more than 2, or no more than 1 nucleotide from the sequence set forth in SEQ ID NO: 65 or 97.

[0548] As another example, a guide RNA targeting intron 1 of a human ALB gene can comprise, consist essentially of, or consist of the sequence set forth in SEQ ID NO: 73 or 105. Alternatively, a guide RNA targeting intron 1 of a human ALB gene can comprise, consist essentially of, or consist of a sequence that is at least 75%, at least 80%, at least 85%, at least 90%, or at least 95% identical to the DNA-targeting segment set forth in SEQ ID NO: 73 or 105. Alternatively, a guide RNA targeting intron 1 of a human ALB gene can comprise, consist essentially of, or consist of a sequence that is at least 90% or at least 95% identical to the DNA-targeting segment set forth in SEQ ID NO: 73 or 105. Alternatively, a guide RNA targeting intron 1 of a human ALB gene can comprise, consist essentially of, or consist of a sequence that differs by no more than 3, no more than 2, or no more than 1 nucleotide from the sequence set forth in SEQ ID NO: 73 or 105.

### (4) Guide RNA Target Sequences

[0549] Target DNAs for guide RNAs include nucleic acid sequences present in a DNA to which a DNA-targeting segment of a gRNA will bind, provided sufficient conditions for binding exist. Suitable DNA/RNA binding conditions include physiological conditions normally present in a cell. Other suitable DNA/RNA binding conditions (e.g., conditions in a cell-free system) are known in the art (see, e.g., Molecular Cloning: A Laboratory Manual, 3rd Ed. (Sambrook et al., Harbor Laboratory Press 2001), herein incorporated by reference in its entirety for all purposes). The strand of the target DNA that is complementary to and hybridizes with the gRNA can be called the “complementary strand,” and the strand of the target DNA that is complementary to the “complementary strand” (and is therefore not complementary to the Cas protein or gRNA) can be called “noncomplementary strand” or “template strand.”

[0550] The target DNA includes both the sequence on the complementary strand to which the guide RNA hybridizes and the corresponding sequence on the non-complementary strand (e.g., adjacent to the protospacer adjacent motif (PAM)). The term “guide RNA target sequence” as used herein refers specifically to the sequence on the non-complementary strand corresponding to (i.e., the reverse complement of) the sequence to which the guide RNA hybridizes on the complementary strand. That is, the guide RNA target sequence refers to the sequence on the non-complementary strand adjacent to the PAM (e.g., upstream or 5′ of the PAM in the case of Cas9). A guide RNA target sequence is equivalent to the DNA-targeting segment of a guide RNA, but with thymines instead of uracils. As one example, a guide RNA target sequence for an SpCas9 enzyme can refer to the sequence upstream of the 5′-NGG-3′ PAM on the non-complementary strand. A guide RNA is designed to have complementarity to the complementary strand of a target DNA, where hybridization between the DNA-targeting segment of the guide RNA and the complementary strand of the target DNA promotes the formation of a CRISPR complex. Full complementarity is not necessarily required, provided that there is sufficient complementarity to cause hybridization and promote formation of a CRISPR complex. If a guide RNA is referred to herein as targeting a guide RNA target sequence, what is meant is that the guide RNA hybridizes to the complementary strand sequence of the target DNA that is the reverse complement of the guide RNA target sequence on the non-complementary strand.

[0551] A target DNA or guide RNA target sequence can comprise any polynucleotide, and can be located, for example, in the nucleus or cytoplasm of a cell or within an organelle of a cell, such as a mitochondrion or chloroplast. A target DNA or guide RNA target sequence can be any nucleic acid sequence endogenous or exogenous to a cell. The guide RNA target sequence can be a sequence coding a gene product (e.g., a protein) or a non-coding sequence (e.g., a regulatory sequence) or can include both.

[0552] Site-specific binding and cleavage of a target DNA by a Cas protein can occur at locations determined by both (i) base-pairing complementarity between the guide RNA and the complementary strand of the target DNA and (ii) a short motif, called the protospacer adjacent motif (PAM), in the non-complementary strand of the target DNA. The PAM can flank the guide RNA target sequence. Optionally, the guide RNA target sequence can be flanked on the 3′ end by the PAM (e.g., for Cas9). Alternatively, the guide RNA target sequence can be flanked on the 5′ end by the PAM (e.g., for Cpf1). For example, the cleavage site of Cas proteins can be about 1 to about 10 or about 2 to about 5 base pairs (e.g., 3 base pairs) upstream or downstream of the PAM sequence (e.g., within the guide RNA target sequence). In the case of SpCas9, the PAM sequence (i.e., on the non-complementary strand) can be 5′-N₁GG-3′, where N₁ is any DNA nucleotide, and where the PAM is immediately 3′ of the guide RNA target sequence on the non-complementary strand of the target DNA. As such, the sequence corresponding to the PAM on the complementary strand (i.e., the reverse complement) would be 5′-CCN₂-3′, where N₂ is any DNA nucleotide and is immediately 5′ of the sequence to which the DNA-targeting segment of the guide RNA hybridizes on the complementary strand of the target DNA. In some such cases, N₁ and N₂ can be complementary and the N₁—N₂ base pair can be any base pair (e.g., N₁=C and N₂=G; N₁=G and N₂=C; N₁=A and N₂=T; or N₁=T, and N₂=A). In the case of Cas9 from S. aureus, the PAM can be NNGRRT or NNGRR, where N can A, G, C, or T, and R can be G or A. In the case of Cas9 from C. jejuni, the PAM can be, for example, NNNNACAC or NNNNRYAC, where N can be A, G, C, or T, and R can be G or A. In some cases (e.g., for FnCpf1), the PAM sequence can be upstream of the 5′ end and have the sequence 5′-TTN-3′. In the case of DpbCasX, the PAM can have the sequence 5′-TTCN-3′. In the case of CasΦ, the PAM can have the sequence 5′-TBN-3′, wherein B is G, T, or C.

[0553] An example of a guide RNA target sequence is a 20-nucleotide DNA sequence immediately preceding an NGG motif recognized by an SpCas9 protein. For example, two examples of guide RNA target sequences plus PAMs are GN₁₉NGG (SEQ ID NO: 5) or N₂₀NGG (SEQ ID NO: 6). See, e.g., WO 2014/165825, herein incorporated by reference in its entirety for all purposes. The guanine at the 5′ end can facilitate transcription by RNA polymerase in cells. Other examples of guide RNA target sequences plus PAMs can include two guanine nucleotides at the 5′ end (e.g., GGN₂₀NGG; SEQ ID NO: 7) to facilitate efficient transcription by T7 polymerase in vitro. See, e.g., WO 2014/065596, herein incorporated by reference in its entirety for all purposes. Other guide RNA target sequences plus PAMs can have between 4-22 nucleotides in length of SEQ ID NOS: 5-7, including the 5′ G or GG and the 3′ GG or NGG. Yet other guide RNA target sequences plus PAMs can have between 14 and 20 nucleotides in length of SEQ ID NOS: 5-7.

[0554] Formation of a CRISPR complex hybridized to a target DNA can result in cleavage of one or both strands of the target DNA within or near the region corresponding to the guide RNA target sequence (i.e., the guide RNA target sequence on the non-complementary strand of the target DNA and the reverse complement on the complementary strand to which the guide RNA hybridizes). For example, the cleavage site can be within the guide RNA target sequence (e.g., at a defined location relative to the PAM sequence). The “cleavage site” includes the position of a target DNA at which a Cas protein produces a single-strand break or a double-strand break. The cleavage site can be on only one strand (e.g., when a nickase is used) or on both strands of a double-stranded DNA. Cleavage sites can be at the same position on both strands (producing blunt ends; e.g., Cas9)) or can be at different sites on each strand (producing staggered ends (i.e., overhangs); e.g., Cpf1). Staggered ends can be produced, for example, by using two Cas proteins, each of which produces a single-strand break at a different cleavage site on a different strand, thereby producing a double-strand break. For example, a first nickase can create a single-strand break on the first strand of double-stranded DNA (dsDNA), and a second nickase can create a single-strand break on the second strand of dsDNA such that overhanging sequences are created. In some cases, the guide RNA target sequence or cleavage site of the nickase on the first strand is separated from the guide RNA target sequence or cleavage site of the nickase on the second strand by at least 2, 3, 4, 5, 6, 7, 8, 9, 10, 15, 20, 25, 30, 40, 50, 75, 100, 250, 500, or 1,000 base pairs.

[0555] The guide RNA target sequence can also be selected to minimize off-target modification or avoid off-target effects (e.g., by avoiding two or fewer mismatches to off-target genomic sequences).

[0556] As one example, a guide RNA targeting intron 1 of a human ALB gene can target the guide RNA target sequence set forth in any one of SEQ ID NOS: 126-157. As another example, a guide RNA targeting intron 1 of a human ALB gene can target at least 17, at least 18, at least 19, or at least 20 contiguous nucleotides of the guide RNA target sequence set forth in any one of SEQ ID NOS: 126-157.

[0557] As another example, a guide RNA targeting intron 1 of a human ALB gene can target the guide RNA target sequence set forth in any one of SEQ ID NOS: 132, 126, 129, and 137. As another example, a guide RNA targeting intron 1 of a human ALB gene can target at least 17, at least 18, at least 19, or at least 20 contiguous nucleotides of the guide RNA target sequence set forth in any one of SEQ ID NOS: 132, 126, 129, and 137.

[0558] As another example, a guide RNA targeting intron 1 of a human ALB gene can target the guide RNA target sequence set forth in SEQ ID NO: 132. As another example, a guide RNA targeting intron 1 of a human ALB gene can target at least 17, at least 18, at least 19, or at least 20 contiguous nucleotides of the guide RNA target sequence set forth in SEQ ID NO: 132.

[0559] As another example, a guide RNA targeting intron 1 of a human ALB gene can target the guide RNA target sequence set forth in SEQ ID NO: 126. As another example, a guide RNA targeting intron 1 of a human ALB gene can target at least 17, at least 18, at least 19, or at least 20 contiguous nucleotides of the guide RNA target sequence set forth in SEQ ID NO: 126.

[0560] As another example, a guide RNA targeting intron 1 of a human ALB gene can target the guide RNA target sequence set forth in SEQ ID NO: 129. As another example, a guide RNA targeting intron 1 of a human ALB gene can target at least 17, at least 18, at least 19, or at least 20 contiguous nucleotides of the guide RNA target sequence set forth in SEQ ID NO: 129.

[0561] As another example, a guide RNA targeting intron 1 of a human ALB gene can target the guide RNA target sequence set forth in SEQ ID NO: 137. As another example, a guide RNA targeting intron 1 of a human ALB gene can target at least 17, at least 18, at least 19, or at least 20 contiguous nucleotides of the guide RNA target sequence set forth in SEQ ID NO: 137.

TABLE 9
Human ALB Intron 1 Guide RNA Target
Sequences.

| Guide RNA Target Sequence | SEQ ID NO: |
|---|---|
| GAGCAACCTCACTCTTGTCT | 126 |
| ATGCATTTGTTTCAAAATAT | 127 |
| TGCATTTGTTTCAAAATATT | 128 |
| ATTTATGAGATCAACAGCAC | 129 |
| GATCAACAGCACAGGTTTTG | 130 |
| TTAAATAAAGCATAGTGCAA | 131 |
| TAAAGCATAGTGCAATGGAT | 132 |
| TAGTGCAATGGATAGGTCTT | 133 |
| TACTAAAACTTTATTTTACT | 134 |
| AAAGTTGAACAATAGAAAAA | 135 |
| AATGCATAATCTAAGTCAAA | 136 |
| TAATAAAATTCAAACATCCT | 137 |
| GCATCTTTAAAGAATTATTT | 138 |
| TTTGGCATTTATTTCTAAAA | 139 |
| TGTATTTGTGAAGTCTTACA | 140 |
| TCCTAGGTAAAAAAAAAAAA | 141 |
| TAATTTTCTTTTGCGCACTA | 142 |
| TGACTGAAACTTCACAGAAT | 143 |
| GACTGAAACTTCACAGAATA | 144 |
| TTCATTTTAGTCTGTCTTCT | 145 |
| ATTATCTAAGTTTGAATATA | 146 |
| AATTTTTAAAATAGTATTCT | 147 |
| TGAATTATTCTTCTGTTTAA | 148 |
| ATCATCCTGAGTTTTTCTGT | 149 |
| TTACTAAAACTTTATTTTAC | 150 |
| ACCTTTTTTTTTTTTTACCT | 151 |
| AGTGCAATGGATAGGTCTTT | 152 |
| TGATTCCTACAGAAAAACTC | 153 |
| TGGGCAAGGGAAGAAAAAAA | 154 |
| CCTCACTCTTGTCTGGGCAA | 155 |
| ACCTCACTCTTGTCTGGGCA | 156 |
| TGAGCAACCTCACTCTTGTC | 157 |

TABLE 10
Mouse Alb Intron 1 Guide RNA Target
Sequences.

| Guide RNA Target Sequence | SEQ ID NO: |
|---|---|
| CACTCTTGTCTGTGGAAACA | 165 |

### (5) Lipid Nanoparticles Comprising Nuclease Agents

[0562] Lipid nanoparticles comprising the nuclease agents (e.g., CRISPR/Cas systems) are also provided. The lipid nanoparticles can alternatively or additionally comprise a nucleic acid construct encoding a multidomain therapeutic protein as disclosed herein. For example, the lipid nanoparticles can comprise a nuclease agent (e.g., CRISPR/Cas system), can comprise a nucleic acid construct encoding a multidomain therapeutic protein, or can comprise both a nuclease agent (e.g., a CRISPR/Cas system) and a nucleic acid construct encoding a multidomain therapeutic protein. Regarding CRISPR/Cas systems, the lipid nanoparticles can comprise the Cas protein in any form (e.g., protein, DNA, or mRNA) and/or can comprise the guide RNA(s) in any form (e.g., DNA or RNA). In one example, the lipid nanoparticles comprise the Cas protein in the form of mRNA (e.g., a modified RNA as described herein) and the guide RNA(s) in the form of RNA (e.g., a modified guide RNA as disclosed herein). As another example, the lipid nanoparticles can comprise the Cas protein in the form of protein and the guide RNA(s) in the form of RNA). In a specific example, the guide RNA and the Cas protein are each introduced in the form of RNA via LNP-mediated delivery in the same LNP. As discussed in more detail elsewhere herein, one or more of the RNAs can be modified. For example, guide RNAs can be modified to comprise one or more stabilizing end modifications at the 5′ end and/or the 3′ end. Such modifications can include, for example, one or more phosphorothioate linkages at the 5′ end and/or the 3′ end and/or one or more 2′-O-methyl modifications at the 5′ end and/or the 3′ end. As another example, Cas mRNA modifications can include substitution with pseudouridine (e.g., fully substituted with pseudouridine), 5′ caps, and polyadenylation. As another example, Cas mRNA modifications can include substitution with N1-methyl-pseudouridine (e.g., fully substituted with N1-methyl-pseudouridine), 5′ caps, and polyadenylation. Other modifications are also contemplated as disclosed elsewhere herein. Delivery through such methods can result in transient Cas expression and/or transient presence of the guide RNA, and the biodegradable lipids improve clearance, improve tolerability, and decrease immunogenicity. Lipid formulations can protect biological molecules from degradation while improving their cellular uptake. Lipid nanoparticles are particles comprising a plurality of lipid molecules physically associated with each other by intermolecular forces. These include microspheres (including unilamellar and multilamellar vesicles, e.g., liposomes), a dispersed phase in an emulsion, micelles, or an internal phase in a suspension. Such lipid nanoparticles can be used to encapsulate one or more nucleic acids or proteins for delivery. Formulations which contain cationic lipids are useful for delivering polyanions such as nucleic acids. Other lipids that can be included are neutral lipids (i.e., uncharged or zwitterionic lipids), anionic lipids, helper lipids that enhance transfection, and stealth lipids that increase the length of time for which nanoparticles can exist in vivo. Examples of suitable cationic lipids, neutral lipids, anionic lipids, helper lipids, and stealth lipids can be found in WO 2016/010840 A1 and WO 2017/173054 A1, each of which is herein incorporated by reference in its entirety for all purposes. An exemplary lipid nanoparticle can comprise a cationic lipid and one or more other components. In one example, the other component can comprise a helper lipid such as cholesterol. In another example, the other components can comprise a helper lipid such as cholesterol and a neutral lipid such as distearoylphosphatidylcholine or 1,2-distearoyl-sn-glycero-3-phosphocholine (DSPC). In another example, the other components can comprise a helper lipid such as cholesterol, an optional neutral lipid such as DSPC, and a stealth lipid such as S010, 5024, 5027, 5031, or 5033.

[0563] The LNP may contain one or more or all of the following: (i) a lipid for encapsulation and for endosomal escape; (ii) a neutral lipid for stabilization; (iii) a helper lipid for stabilization; and (iv) a stealth lipid. See, e.g., Finn et al. (2018) Cell Rep. 22(9):2227-2235 and WO 2017/173054 A1, each of which is herein incorporated by reference in its entirety for all purposes. In certain LNPs, the cargo can include a guide RNA or a nucleic acid encoding a guide RNA. In certain LNPs, the cargo can include an mRNA encoding a Cas nuclease, such as Cas9, and a guide RNA or a nucleic acid encoding a guide RNA. In certain LNPs, the cargo can include a nucleic acid construct encoding a multidomain therapeutic protein as described elsewhere herein. In certain LNPs, the cargo can include an mRNA encoding a Cas nuclease, such as Cas9, a guide RNA or a nucleic acid encoding a guide RNA, and a nucleic acid construct encoding a multidomain therapeutic protein. In some LNPs, the lipid component comprises an amine lipid such as a biodegradable, ionizable lipid. In some instances, the lipid component comprises biodegradable, ionizable lipid, cholesterol, DSPC, and PEG-DMG. For example, Cas9 mRNA and gRNA can be delivered to cells and animals utilizing lipid formulations comprising ionizable lipid ((9Z,12Z)-3-((4,4-bis(octyloxy)butanoyl)oxy)-2-((((3-(diethylamino)propoxy)carbonyl)oxy)methyl)propyl octadeca-9,12-dienoate, also called 3-((4,4-bis(octyloxy)butanoyl)oxy)-2-((((3-(diethylamino)propoxy)carbonyl)oxy)methyl)propyl (9Z, 12Z)-octadeca-9,12-dienoate), cholesterol, DSPC, and PEG2k-DMG.

[0564] In some examples, the LNPs comprise cationic lipids. In some examples, the LNPs comprise (9Z,12Z)-3-((4,4-bis(octyloxy)butanoyl)oxy)-2-((((3-(diethylamino)propoxy)carbonyl)oxy)methyl)propyl octadeca-9,12-dienoate, also called 3-((4,4-bis(octyloxy)butanoyl)oxy)-2-((((3-(diethylamino)propoxy)carbonyl)oxy)methyl)propyl (9Z,12Z)-octadeca-9,12-dienoate) or another ionizable lipid. See, e.g., WO 2019/067992, WO 2017/173054, WO 2015/095340, and WO 2014/136086, each of which is herein incorporated by reference in its entirety for all purposes. In some examples, the LNPs comprise molar ratios of a cationic lipid amine to RNA phosphate (N:P) of about 4.5, about 5.0, about 5.5, about 6.0, or about 6.5. In some examples, the terms cationic and ionizable in the context of LNP lipids are interchangeable (e.g., wherein ionizable lipids are cationic depending on the pH).

[0565] The lipid for encapsulation and endosomal escape can be a cationic lipid. The lipid can also be a biodegradable lipid, such as a biodegradable ionizable lipid. One example of a suitable lipid is Lipid A or LP01, which is (9Z,12Z)-3-((4,4-bis(octyloxy)butanoyl)oxy)-2-((((3-(diethylamino)propoxy)carbonyl)oxy)methyl)propyl octadeca-9,12-dienoate, also called 3-((4,4-bis(octyloxy)butanoyl)oxy)-2-((((3-(diethylamino)propoxy)carbonyl)oxy)methyl)propyl (9Z,12Z)-octadeca-9,12-dienoate. See, e.g., Finn et al. (2018) Cell Rep. 22(9):2227-2235 and WO 2017/173054 A1, each of which is herein incorporated by reference in its entirety for all purposes. Another example of a suitable lipid is Lipid B, which is ((5-((dimethylamino)methyl)-1,3-phenylene)bis(oxy))bis(octane-8,1-diyl)bis(decanoate), also called ((5-((dimethylamino)methyl)-1,3-phenylene)bis(oxy))bis(octane-8,1-diyl)bis(decanoate). Another example of a suitable lipid is Lipid C, which is 2-((4-(((3-(dimethylamino)propoxy)carbonyl)oxy)hexadecanoyl)oxy)propane-1,3-diyl(9Z,9′Z,12Z,12′Z)-bis(octadeca-9,12-dienoate). Another example of a suitable lipid is Lipid D, which is 3-(((3-(dimethylamino)propoxy)carbonyl)oxy)-13-(octanoyloxy)tridecyl 3-octylundecanoate. Other suitable lipids include heptatriaconta-6,9,28,31-tetraen-19-yl 4-(dimethylamino)butanoate (also known as [(6Z,9Z,28Z,31Z)-heptatriaconta-6,9,28,31-tetraen-19-yl]4-(dimethylamino)butanoate or Dlin-MC3-DMA (MC3))).

[0566] Some such lipids suitable for use in the LNPs described herein are biodegradable in vivo.

[0567] Such lipids may be ionizable depending upon the pH of the medium they are in. For example, in a slightly acidic medium, the lipids may be protonated and thus bear a positive charge. Conversely, in a slightly basic medium, such as, for example, blood where pH is approximately 7.35, the lipids may not be protonated and thus bear no charge. In some embodiments, the lipids may be protonated at a pH of at least about 9, 9.5, or 10. The ability of such a lipid to bear a charge is related to its intrinsic pKa. For example, the lipid may, independently, have a pKa in the range of from about 5.8 to about 6.2.

[0568] Neutral lipids function to stabilize and improve processing of the LNPs. Examples of suitable neutral lipids include a variety of neutral, uncharged or zwitterionic lipids. Examples of neutral phospholipids suitable for use in the present disclosure include, but are not limited to, 5-heptadecylbenzene-1,3-diol (resorcinol), dipalmitoylphosphatidylcholine (DPPC), distearoylphosphatidylcholine or 1,2-distearoyl-sn-glycero-3-phosphocholine (DSPC), phosphocholine (DOPC), dimyristoylphosphatidylcholine (DMPC), phosphatidylcholine (PLPC), 1,2-diarachidonoyl-sn-glycero-3-phosphocholine (DAPC), phosphatidylethanolamine (PE), egg phosphatidylcholine (EPC), dilauryloylphosphatidylcholine (DLPC), dimyristoylphosphatidylcholine (DMPC), 1-myristoyl-2-palmitoyl phosphatidylcholine (MPPC), 1-palmitoyl-2-myristoyl phosphatidylcholine (PMPC), 1-palmitoyl-2-stearoyl phosphatidylcholine (PSPC), 1,2-diarachidoyl-sn-glycero-3-phosphocholine (DBPC), 1-stearoyl-2-palmitoyl phosphatidylcholine (SPPC), 1,2-dieicosenoyl-sn-glycero-3-phosphocholine (DEPC), palmitoyloleoyl phosphatidylcholine (POPC), lysophosphatidyl choline, dioleoyl phosphatidylethanolamine (DOPE), dilinoleoylphosphatidylcholine distearoylphosphatidylethanolamine (DSPE), dimyristoyl phosphatidylethanolamine (DMPE), dipalmitoyl phosphatidylethanolamine (DPPE), palmitoyloleoyl phosphatidylethanolamine (POPE), lysophosphatidylethanolamine, 1-stearoyl-2-oleoyl-sn-glycero-3-phosphocholine (SOPC), and combinations thereof. For example, the neutral phospholipid may be selected from the group consisting of distearoylphosphatidylcholine (DSPC) and dimyristoyl phosphatidyl ethanolamine (DMPE).

[0569] Helper lipids include lipids that enhance transfection. The mechanism by which the helper lipid enhances transfection can include enhancing particle stability. In certain cases, the helper lipid can enhance membrane fusogenicity. Helper lipids include steroids, sterols, and alkyl resorcinols. Examples of suitable helper lipids suitable include cholesterol, 5-heptadecylresorcinol, and cholesterol hemisuccinate. In one example, the helper lipid may be cholesterol or cholesterol hemisuccinate.

[0570] Stealth lipids include lipids that alter the length of time the nanoparticles can exist in vivo. Stealth lipids may assist in the formulation process by, for example, reducing particle aggregation and controlling particle size. Stealth lipids may modulate pharmacokinetic properties of the LNP. Suitable stealth lipids include lipids having a hydrophilic head group linked to a lipid moiety.

[0571] The hydrophilic head group of a stealth lipid can comprise, for example, a polymer moiety selected from polymers based on PEG (sometimes referred to as poly(ethylene oxide)), poly(oxazoline), poly(vinyl alcohol), poly(glycerol), poly(N-vinylpyrrolidone), polyaminoacids, and poly N-(2-hydroxypropyl)methacrylamide. The term PEG means any polyethylene glycol or other polyalkylene ether polymer. In certain LNP formulations, the PEG, is a PEG-2K, also termed PEG 2000, which has an average molecular weight of about 2,000 daltons. See, e.g., WO 2017/173054 A1, herein incorporated by reference in its entirety for all purposes.

[0572] The lipid moiety of the stealth lipid may be derived, for example, from diacylglycerol or diacylglycamide, including those comprising a dialkylglycerol or dialkylglycamide group having alkyl chain length independently comprising from about C4 to about C40 saturated or unsaturated carbon atoms, wherein the chain may comprise one or more functional groups such as, for example, an amide or ester. The dialkylglycerol or dialkylglycamide group can further comprise one or more substituted alkyl groups.

[0573] As one example, the stealth lipid may be selected from PEG-dilauroylglycerol, PEG-dimyristoylglycerol (PEG-DMG), PEG-dipalmitoylglycerol, PEG-distearoylglycerol (PEG-DSPE), PEG-dilaurylglycamide, PEG-dimyristylglycamide, PEG-dipalmitoylglycamide, and PEG-distearoylglycamide, PEG-cholesterol (1-[8′-(Cholest-5-en-3[beta]-oxy)carboxamido-3′,6′-dioxaoctanyl]carbamoyl-[omega]-methyl-poly(ethylene glycol), PEG-DMB (3,4-ditetradecoxylbenzyl-[omega]-methyl-poly(ethylene glycol)ether), 1,2-dimyristoyl-sn-glycero-3-phosphoethanolamine-N-[methoxy(polyethylene glycol)-2000] (PEG2k-DMPE),or 1,2-dimyristoyl-rac-glycero-3-methylpolyoxyethylene glycol-2000 (PEG2k-DMG), 1,2-distearoyl-sn-glycero-3-phosphoethanolamine-N-[methoxy(polyethylene glycol)-2000] (PEG2k-DSPE), 1,2-distearoyl-sn-glycerol, methoxypoly ethylene glycol (PEG2k-DSG), poly(ethylene glycol)-2000-dimethacrylate (PEG2k-DMA), and 1,2-distearyloxypropyl-3-amine-N-[methoxy(polyethylene glycol)-2000] (PEG2k-DSA). In one particular example, the stealth lipid may be PEG2k-DMG.

[0574] In some embodiments, the PEG lipid includes a glycerol group. In some embodiments, the PEG lipid includes a dimyristoylglycerol (DMG) group. In some embodiments, the PEG lipid comprises PEG2k. In some embodiments, the PEG lipid is a PEG-DMG. In some embodiments, the PEG lipid is a PEG2k-DMG. In some embodiments, the PEG lipid is 1,2-dimyristoyl-rac-glycero-3-methoxypolyethylene glycol-2000. In some embodiments, the PEG2k-DMG is 1,2-dimyristoyl-rac-glycero-3-methoxypolyethylene glycol-2000.

[0575] The LNPs can comprise different respective molar ratios of the component lipids in the formulation. The mol-% of the CCD lipid may be, for example, from about 30 mol-% to about 60 mol-%. The mol-% of the helper lipid may be, for example, from about 30 mol-% to about 60 mol-%. The mol-% of the neutral lipid may be, for example, from about 1 mol-% to about 20 mol-%. The mol-% of the stealth lipid may be, for example, from about 1 mol-% to about 10 mol-%

[0576] The LNPs can have different ratios between the positively charged amine groups of the biodegradable lipid (N) and the negatively charged phosphate groups (P) of the nucleic acid to be encapsulated. This may be mathematically represented by the equation N/P. For example, the N/P ratio may be from about 0.5 to about 100. The N/P ratio can also be from about 4 to about 6.

[0577] In some LNPs, the cargo can comprise Cas mRNA (e.g., Cas9 mRNA) and gRNA. The Cas mRNA and gRNAs can be in different ratios. For example, the LNP formulation can include a ratio of Cas mRNA to gRNA nucleic acid ranging from about 25:1 to about 1:25. Alternatively, the LNP formulation can include a ratio of Cas mRNA to gRNA nucleic acid of from about 2:1 to about 1:2. In specific examples, the ratio of Cas mRNA to gRNA can be about 2:1.

[0578] In some LNPs, the cargo can comprise a nucleic acid construct encoding a multidomain therapeutic protein and gRNA. The nucleic acid construct encoding a multidomain therapeutic protein and gRNAs can be in different ratios. For example, the LNP formulation can include a ratio of nucleic acid construct to gRNA nucleic acid ranging from about 25:1 to about 1:25.

[0579] A specific example of a suitable LNP has a nitrogen-to-phosphate (N/P) ratio of about 4.5 and contains biodegradable cationic lipid, cholesterol, DSPC, and PEG2k-DMG in an about 45:44:9:2 molar ratio (about 45:about 44:about 9:about 2). The biodegradable cationic lipid can be (9Z,12Z)-3-((4,4-bis(octyloxy)butanoyl)oxy)-2-((((3-(diethylamino)propoxy)carbonyl)oxy)methyl)propyl octadeca-9,12-dienoate, also called 3-((4,4-bis(octyloxy)butanoyl)oxy)-2-((((3-(diethylamino)propoxy)carbonyl)oxy)methyl)propyl (9Z,12Z)-octadeca-9,12-dienoate. See, e.g., Finn et al. (2018) Cell Rep. 22(9):2227-2235, herein incorporated by reference in its entirety for all purposes. The Cas9 mRNA can be in an about 1:1 (about 1:about 1) ratio by weight to the guide RNA. Another specific example of a suitable LNP contains Dlin-MC3-DMA (MC3), cholesterol, DSPC, and PEG-DMG in an about 50:38.5:10:1.5 molar ratio (about 50:about 38.5:about 10:about 1.5). The Cas9 mRNA can be in an about 1:2 ratio (about 1:about 2) by weight to the guide RNA. The Cas9 mRNA can be in an about 1:1 ratio (about 1:about 1) by weight to the guide RNA. The Cas9 mRNA can be in an about 2:1 ratio (about 2:about 1) by weight to the guide RNA.

[0580] Another specific example of a suitable LNP has a nitrogen-to-phosphate (N/P) ratio of about 6 and contains biodegradable cationic lipid, cholesterol, DSPC, and PEG2k-DMG in an about 50:38:9:3 molar ratio (about 50:about 38:about 9:about 3). The biodegradable cationic lipid can be Lipid A ((9Z,12Z)-3-((4,4-bis(octyloxy)butanoyl)oxy)-2-((((3-(diethylamino)propoxy)carbonyl)oxy)methyl)propyl octadeca-9,12-dienoate, also called 3-((4,4-bis(octyloxy)butanoyl)oxy)-2-((((3-(diethylamino)propoxy)carbonyl)oxy)methyl)propyl (9Z,12Z)-octadeca-9,12-dienoate). The Cas9 mRNA can be in an about 1:2 ratio (about 1:about 2) by weight to the guide RNA. The Cas9 mRNA can be in an about 1:1 ratio (about 1:about 1) by weight to the guide RNA. The Cas9 mRNA can be in an about 2:1 (about 2:about 1) ratio by weight to the guide RNA.

[0581] Another specific example of a suitable LNP has a nitrogen-to-phosphate (N/P) ratio of about 3 and contains a cationic lipid, a structural lipid, cholesterol (e.g., cholesterol (ovine) (Avanti 700000)), and PEG2k-DMG (e.g., PEG-DMG 2000 (NOF America-SUNBRIGHT® GM-020(DMG-PEG)) in an about 50:10:38.5:1.5 ratio (about 50:about 10:about 38.5:about 1.5) or an about 47:10:42:1 ratio (about 47:about 10:about 42:about 1). The structural lipid can be, for example, DSPC (e.g., DSPC (Avanti 850365)), SOPC, DOPC, or DOPE. The cationic/ionizable lipid can be, for example, Dlin-MC3-DMA (e.g., Dlin-MC3-DMA (Biofine International)). The Cas9 mRNA can be in an about 1:2 ratio (about 1:about 2) by weight to the guide RNA. The Cas9 mRNA can be in an about 1:1 ratio (about 1:about 1) by weight to the guide RNA. The Cas9 mRNA can be in an about 2:1 ratio (about 2:about 1) by weight to the guide RNA.

[0582] Another specific example of a suitable LNP contains Dlin-MC3-DMA, DSPC, cholesterol, and a PEG lipid in an about 45:9:44:2 ratio (about 45:about 9:about 44:about 2). Another specific example of a suitable LNP contains Dlin-MC3-DMA, DOPE, cholesterol, and PEG lipid or PEG DMG in an about 50:10:39:1 ratio (about 50:about 10:about 39:about 1). Another specific example of a suitable LNP has Dlin-MC3-DMA, DSPC, cholesterol, and PEG2k-DMG at an about 55:10:32.5:2.5 ratio (about 55:about 10:about 32.5:about 2.5). Another specific example of a suitable LNP has Dlin-MC3-DMA, DSPC, cholesterol, and PEG-DMG in an about 50:10:38.5:1.5 ratio (about 50:about 10:about 38.5:about 1.5). Another specific example of a suitable LNP has Dlin-MC3-DMA, DSPC, cholesterol, and PEG-DMG in an about 50:10:38.5:1.5 ratio (about 50:about 10:about 38.5:about 1.5). The Cas9 mRNA can be in an about 1:2 ratio (about 1:about 2) by weight to the guide RNA. The Cas9 mRNA can be in an about 1:1 ratio (about 1:about 1) by weight to the guide RNA. The Cas9 mRNA can be in an about 2:1 ratio (about 2:about 1) by weight to the guide RNA.

[0583] Other examples of suitable LNPs can be found, e.g., in WO 2019/067992, WO 2020/082042, US 2020/0270617, WO 2020/082041, US 2020/0268906, WO 2020/082046 (see, e.g., pp. 85-86), and US 2020/0289628, each of which is herein incorporated by reference in its entirety for all purposes.

### (6) Vectors Comprising Nuclease Agents

[0584] The nuclease agents disclosed herein (e.g., ZFN, TALEN, or CRISPR/Cas) can be provided in a vector for expression. A vector can comprise additional sequences such as, for example, replication origins, promoters, and genes encoding antibiotic resistance.

[0585] Some vectors may be circular. Alternatively, the vector may be linear. The vector can be in the packaged for delivered via a lipid nanoparticle, liposome, non-lipid nanoparticle, or viral capsid. Non-limiting exemplary vectors include plasmids, phagemids, cosmids, artificial chromosomes, minichromosomes, transposons, viral vectors, and expression vectors.

[0586] Introduction of nucleic acids can also be accomplished by virus-mediated delivery, such as AAV-mediated delivery or lentivirus-mediated delivery. The vectors can be, for example, viral vectors such as adeno-associated virus (AAV) vectors. The AAV may be any suitable serotype and may be a single-stranded AAV (ssAAV) or a self-complementary AAV (scAAV). Other exemplary viruses/viral vectors include retroviruses, lentiviruses, adenoviruses, vaccinia viruses, poxviruses, and herpes simplex viruses. The viruses can infect dividing cells, non-dividing cells, or both dividing and non-dividing cells. The viruses can integrate into the host genome or alternatively do not integrate into the host genome. Such viruses can also be engineered to have reduced immunity. The viruses can be replication-competent or can be replication-defective (e.g., defective in one or more genes necessary for additional rounds of virion replication and/or packaging). Viral vector may be genetically modified from their wild type counterparts. For example, the viral vector may comprise an insertion, deletion, or substitution of one or more nucleotides to facilitate cloning or such that one or more properties of the vector is changed. Such properties may include packaging capacity, transduction efficiency, immunogenicity, genome integration, replication, transcription, and translation. In some examples, a portion of the viral genome may be deleted such that the virus is capable of packaging exogenous sequences having a larger size. In some examples, the viral vector may have an enhanced transduction efficiency. In some examples, the immune response induced by the virus in a host may be reduced. In some examples, viral genes (such as integrase) that promote integration of the viral sequence into a host genome may be mutated such that the virus becomes non-integrating. In some examples, the viral vector may be replication defective. In some examples, the viral vector may comprise exogenous transcriptional or translational control sequences to drive expression of coding sequences on the vector. In some examples, the virus may be helper-dependent. For example, the virus may need one or more helper virus to supply viral components (such as viral proteins) required to amplify and package the vectors into viral particles. In such a case, one or more helper components, including one or more vectors encoding the viral components, may be introduced into a host cell or population of host cells along with the vector system described herein. In other examples, the virus may be helper-free. For example, the virus may be capable of amplifying and packaging the vectors without a helper virus. In some examples, the vector system described herein may also encode the viral components required for virus amplification and packaging.

[0587] Exemplary viral titers (e.g., AAV titers) include about 10¹² to about 10¹⁶ vg/mL. Other exemplary viral titers (e.g., AAV titers) include about 10¹² to about 10¹⁶ vg/kg of body weight.

[0588] Adeno-associated viruses (AAVs) are endemic in multiple species including human and non-human primates (NHPs). At least 12 natural serotypes and hundreds of natural variants have been isolated and characterized to date. See, e.g., Li et al. (2020) Nat. Rev. Genet. 21:255-272, herein incorporated by reference in its entirety for all purposes. AAV particles are naturally composed of a non-enveloped icosahedral protein capsid containing a single-stranded DNA (ssDNA) genome. The DNA genome is flanked by two inverted terminal repeats (ITRs) which serve as the viral origins of replication and packaging signals. The rep gene encodes four proteins required for viral replication and packaging whilst the cap gene encodes the three structural capsid subunits which dictate the AAV serotype, and the Assembly Activating Protein (AAP) which promotes virion assembly in some serotypes.

[0589] Recombinant AAV (rAAV) is currently one of the most commonly used viral vectors used in gene therapy to treat human diseases by delivering therapeutic transgenes to target cells in vivo. Indeed, rAAV vectors are composed of icosahedral capsids similar to natural AAVs, but rAAV virions do not encapsidate AAV protein-coding or AAV replicating sequences. These viral vectors are non-replicating. The only viral sequences required in rAAV vectors are the two ITRs, which are needed to guide genome replication and packaging during manufacturing of the rAAV vector. rAAV genomes are devoid of AAV rep and cap genes, rendering them non-replicating in vivo. rAAV vectors are produced by expressing rep and cap genes along with additional viral helper proteins in trans, in combination with the intended transgene cassette flanked by AAV ITRs.

[0590] In therapeutic rAAV genomes, a gene expression cassette is placed between ITR sequences. Typically, rAAV genome cassettes comprise of a promoter to drive expression of a therapeutic transgene, followed by polyadenylation sequence. The ITRs flanking a rAAV expression cassette are usually derived from AAV2, the first serotype to be isolated and converted into a recombinant viral vector. Since then, most rAAV production methods rely on AAV2 Rep-based packaging systems. See, e.g., Colella et al. (2017) Mol. Ther. Methods Clin. Dev. 8:87-104, herein incorporated by reference in its entirety for all purposes.

[0591] Some non-limiting examples of ITRs that can be used include ITRs comprising, consisting essentially of, or consisting of SEQ ID NO: 158, SEQ ID NO: 159, or SEQ ID NO: 160. Other examples of ITRs comprise one or more mutations compared to SEQ ID NO: 158, SEQ ID NO: 159, or SEQ ID NO: 160 and can be at least 90%, at least 91%, at least 92%, at least 93%, at least 94%, at least 95%, at least 96%, at least 97%, at least 98%, or at least 99% identical to SEQ ID NO: 158, SEQ ID NO: 159, or SEQ ID NO: 160. In some rAAV genomes disclosed herein, the nucleic acid encoding the nuclease agent (or component thereof) is flanked on both sides by the same ITR (i.e., the ITR on the 5′ end, and the reverse complement of the ITR on the 3′ end, such as SEQ ID NO: 158 on the 5′ end and SEQ ID NO: 168 on the 3′ end, or SEQ ID NO: 159 on the 5′ end and SEQ ID NO: 613 on the 3′ end, or SEQ ID NO: 160 on the 5′ end and SEQ ID NO: 614 on the 3′ end). In one example, the ITR on each end can comprise, consist essentially of, or consist of SEQ ID NO: 158 (i.e., SEQ ID NO: 158 on the 5′ end, and the reverse complement on the 3′ end). In another example, the ITR on each end can comprise, consist essentially of, or consist of SEQ ID NO: 159 (i.e., SEQ ID NO: 159 on the 5′ end, and the reverse complement on the 3′ end). In one example, the ITR on at least one end comprises, consists essentially of, or consists of SEQ ID NO: 160. In one example, the ITR on the 5′ end comprises, consists essentially of, or consists of SEQ ID NO: 160. In one example, the ITR on the 3′ end comprises, consists essentially of, or consists of SEQ ID NO: 160. In one example, the ITR on each end can comprise, consist essentially of, or consist of SEQ ID NO: 160 (i.e., SEQ ID NO: 160 on the 5′ end, and the reverse complement on the 3′ end). In one example, the ITR on each end can comprise, consist essentially of, or consist of SEQ ID NO: 160. In other rAAV genomes disclosed herein, the nucleic acid encoding the nuclease agent (or component thereof) is flanked by different ITRs on each end. In one example, the ITR on one end comprises, consists essentially of, or consists of SEQ ID NO: 158, and the ITR on the other end comprises, consists essentially of, or consists of SEQ ID NO: 159. In another example, the ITR on one end comprises, consists essentially of, or consists of SEQ ID NO: 158, and the ITR on the other end comprises, consists essentially of, or consists of SEQ ID NO: 160. In one example, the ITR on one end comprises, consists essentially of, or consists of SEQ ID NO: 159, and the ITR on the other end comprises, consists essentially of, or consists of SEQ ID NO: 160.

[0592] The specific serotype of a recombinant AAV vector influences its in vivo tropism to specific tissues. AAV capsid proteins are responsible for mediating attachment and entry into target cells, followed by endosomal escape and trafficking to the nucleus. Thus, the choice of serotype when developing a rAAV vector will influence what cell types and tissues the vector is most likely to bind to and transduce when injected in vivo. Several serotypes of rAAVs, including rAAV8, are capable of transducing the liver when delivered systemically in mice, NHPs and humans. See, e.g., Li et al. (2020) Nat. Rev. Genet. 21:255-272, herein incorporated by reference in its entirety for all purposes.

[0593] Once in the nucleus, the ssDNA genome is released from the virion and a complementary DNA strand is synthesized to generate a double-stranded DNA (dsDNA) molecule. Double-stranded AAV genomes naturally circularize via their ITRs and become episomes which will persist extrachromosomally in the nucleus. Therefore, for episomal gene therapy programs, rAAV-delivered rAAV episomes provide long-term, promoter-driven gene expression in non-dividing cells. However, this rAAV-delivered episomal DNA is diluted out as cells divide. In contrast, the gene therapy described herein is based on gene insertion to allow long-term gene expression.

[0594] When specific rAAVs comprising specific sequences (e.g., specific bidirectional construct sequences or specific unidirectional construct sequences) are disclosed herein, they are meant to encompass the sequence disclosed or the reverse complement of the sequence. For example, if a bidirectional or unidirectional construct disclosed herein consists of the hypothetical sequence 5′-CTGGACCGA-3′, it is also meant to encompass the reverse complement of that sequence (5′-TCGGTCCAG-3′). Likewise, when rAAVs comprising bidirectional or unidirectional construct elements in a specific 5′ to 3′ order are disclosed herein, they are also meant to encompass the reverse complement of the order of those elements. For example, if an rAAV is disclosed herein that comprises a bidirectional construct that comprises from 5′ to 3′ a first splice acceptor, a first coding sequence, a first terminator, a reverse complement of a second terminator, a reverse complement of a second coding sequence, and a reverse complement of a second splice acceptor, it is also meant to encompass a construct comprising from 5′ to 3′ the second splice acceptor, the second coding sequence, the second terminator, a reverse complement of the first terminator, a reverse complement of the first coding sequence, and a reverse complement of the first splice acceptor. Single-stranded AAV genomes are packaged as either sense (plus-stranded) or anti-sense (minus-stranded genomes), and single-stranded AAV genomes of + and − polarity are packaged with equal frequency into mature rAAV virions. See, e.g., LING et al. (2015) J. Mol. Genet. Med. 9(3):175, Zhou et al. (2008) Mol. Ther. 16(3):494-499, and Samulski et al. (1987) J. Virol. 61:3096-3101, each of which is herein incorporated by reference in its entirety for all purposes.

[0595] The ssDNA AAV genome consists of two open reading frames, Rep and Cap, flanked by two inverted terminal repeats that allow for synthesis of the complementary DNA strand. When constructing an AAV transfer plasmid, the transgene is placed between the two ITRs, and Rep and Cap can be supplied in trans. In addition to Rep and Cap, AAV can require a helper plasmid containing genes from adenovirus. These genes (E4, E2a, and VA) mediate AAV replication. For example, the transfer plasmid, Rep/Cap, and the helper plasmid can be transfected into HEK293 cells containing the adenovirus gene E1+ to produce infectious AAV particles. Alternatively, the Rep, Cap, and adenovirus helper genes may be combined into a single plasmid. Similar packaging cells and methods can be used for other viruses, such as retroviruses.

[0596] Multiple serotypes of AAV have been identified. These serotypes differ in the types of cells they infect (i.e., their tropism), allowing preferential transduction of specific cell types. The term AAV includes, for example, AAV1, AAV2, AAV3, AAV3B, AAV4, AAV5, AAV6, AAV6.2, AAV7, AAVrh.64R1, AAVhu.37, AAVrh.8, AAVrh.32.33, AAV8, AAV9, AAV-DJ, AAV2/8, AAVrh10, AAVLK03, AV10, AAV11, AAV12, rh10, and hybrids thereof, avian AAV, bovine AAV, canine AAV, equine AAV, primate AAV, non-primate AAV, and ovine AAV. The genomic sequences of various serotypes of AAV, as well as the sequences of the native terminal repeats (TRs), Rep proteins, and capsid subunits are known in the art. Such sequences may be found in the literature or in public databases such as GenBank. A “AAV vector” as used herein refers to an AAV vector comprising a heterologous sequence not of AAV origin (i.e., a nucleic acid sequence heterologous to AAV), typically comprising a sequence encoding an exogenous polypeptide of interest (e.g., multidomain therapeutic protein). The construct may comprise an AAV1, AAV2, AAV3, AAV3B, AAV4, AAV5, AAV6, AAV6.2, AAV7, AAVrh.64R1, AAVhu.37, AAVrh.8, AAVrh.32.33, AAV8, AAV9, AAV-DJ, AAV2/8, AAVrh10, AAVLK03, AV10, AAV11, AAV12, rh10, and hybrids thereof, avian AAV, bovine AAV, canine AAV, equine AAV, primate AAV, non-primate AAV, and ovine AAV capsid sequence. In general, the heterologous nucleic acid sequence (the transgene) is flanked by at least one, and generally by two, AAV inverted terminal repeat sequences (ITRs). An AAV vector may either be single-stranded (ssAAV) or self-complementary (scAAV). Examples of serotypes for liver tissue include AAV3B, AAV5, AAV6, AAV7, AAV8, AAV9, AAVrh.74, and AAVhu.37, and particularly AAV8. In a specific example, the AAV vector comprising the nucleic acid construct can be recombinant AAV8 (rAAV8). A rAAV8 vector as described herein is one in which the capsid is from AAV8. For example, an AAV vector using ITRs from AAV2 and a capsid of AAV8 is considered herein to be a rAAV8 vector.

[0597] Tropism can be further refined through pseudotyping, which is the mixing of a capsid and a genome from different viral serotypes. For example, AAV2/5 indicates a virus containing the genome of serotype 2 packaged in the capsid from serotype 5. Use of pseudotyped viruses can improve transduction efficiency, as well as alter tropism. Hybrid capsids derived from different serotypes can also be used to alter viral tropism. For example, AAV-DJ contains a hybrid capsid from eight serotypes and displays high infectivity across a broad range of cell types in vivo. AAV-DJ8 is another example that displays the properties of AAV-DJ but with enhanced brain uptake. AAV serotypes can also be modified through mutations. Examples of mutational modifications of AAV2 include Y444F, Y500F, Y730F, and S662V. Examples of mutational modifications of AAV3 include Y705F, Y731F, and T492V. Examples of mutational modifications of AAV6 include S663V and T492V. Other pseudotyped/modified AAV variants include AAV2/1, AAV2/6, AAV2/7, AAV2/8, AAV2/9, AAV2.5, AAV8.2, and AAV/SASTG.

[0598] To accelerate transgene expression, self-complementary AAV (scAAV) variants can be used. Because AAV depends on the cell's DNA replication machinery to synthesize the complementary strand of the AAV's single-stranded DNA genome, transgene expression may be delayed. To address this delay, scAAV containing complementary sequences that are capable of spontaneously annealing upon infection can be used, eliminating the requirement for host cell DNA synthesis. However, single-stranded AAV (ssAAV) vectors can also be used.

[0599] To increase packaging capacity, longer transgenes may be split between two AAV transfer plasmids, the first with a 3′ splice donor and the second with a 5′ splice acceptor. Upon co-infection of a cell, these viruses form concatemers, are spliced together, and the full-length transgene can be expressed. Although this allows for longer transgene expression, expression is less efficient. Similar methods for increasing capacity utilize homologous recombination. For example, a transgene can be divided between two transfer plasmids but with substantial sequence overlap such that co-expression induces homologous recombination and expression of the full-length transgene.

[0600] In certain AAVs, the cargo can include nucleic acids encoding one or more guide RNAs (e.g., DNA encoding a guide RNA, or DNA encoding two or more guide RNAs). In certain AAVs, the cargo can include a nucleic acid (e.g., DNA) encoding a Cas nuclease, such as Cas9, and DNA encoding one or more guide RNAs (e.g., DNA encoding a guide RNA, or DNA encoding two or more guide RNAs). In certain AAVs, the cargo can include a nucleic acid construct encoding a multidomain therapeutic protein. In certain AAVs, the cargo can include a nucleic acid (e.g., DNA) encoding a Cas nuclease, such as Cas9, a DNA encoding a guide RNA (or multiple guide RNAs), and a nucleic acid construct encoding a multidomain therapeutic protein.

[0601] For example, Cas or Cas9 and one or more gRNAs (e.g., 1 gRNA or 2 gRNAs or 3 gRNAs or 4 gRNAs) can be delivered via LNP-mediated delivery (e.g., in the form of RNA) or adeno-associated virus (AAV)-mediated delivery (e.g., rAAV8-mediated delivery). For example, a Cas9 mRNA and a gRNA can be delivered via LNP-mediated delivery, or DNA encoding Cas9 and DNA encoding a gRNA can be delivered via AAV-mediated delivery. The Cas or Cas9 and the gRNA(s) can be delivered in a single AAV or via two separate AAVs. For example, a first AAV can carry a Cas or Cas9 expression cassette, and a second AAV can carry a gRNA expression cassette. Similarly, a first AAV can carry a Cas or Cas9 expression cassette, and a second AAV can carry two or more gRNA expression cassettes. Alternatively, a single AAV can carry a Cas or Cas9 expression cassette (e.g., Cas or Cas9 coding sequence operably linked to a promoter) and a gRNA expression cassette (e.g., gRNA coding sequence operably linked to a promoter). Similarly, a single AAV can carry a Cas or Cas9 expression cassette (e.g., Cas or Cas9 coding sequence operably linked to a promoter) and two or more gRNA expression cassettes (e.g., gRNA coding sequences operably linked to promoters). Different promoters can be used to drive expression of the gRNA, such as a U6 promoter or the small tRNA Gln. Likewise, different promoters can be used to drive Cas9 expression. For example, small promoters are used so that the Cas9 coding sequence can fit into an AAV construct. Similarly, small Cas9 proteins (e.g., SaCas9 or CjCas9 are used to maximize the AAV packaging capacity).

### C. Cells or Animals or Genomes

[0602] Cells or animals (i.e., subjects) comprising any of the above compositions (e.g., multidomain therapeutic protein, nucleic acid construct encoding a multidomain therapeutic protein, nuclease agents, vectors, lipid nanoparticles, or any combination thereof) are also provided herein. Such cells or animals (or genomes) can be produced by the methods disclosed herein. For example, the cells or animals can comprise any of the multidomain therapeutic proteins described herein, any of the nucleic acid constructs encoding a multidomain therapeutic protein described herein, any of the nuclease agents disclosed herein, or both. Such cells or animals (or genomes) can be neonatal cells or animals (or genomes). Alternatively, such cells or animals (or genomes) can be non-neonatal cells or animals (or genomes).

[0603] A neonatal subject (e.g., animal) can be a human subject up to or under the age of 1 year (52 weeks), preferably up to or under the age of 24 weeks, more preferably up to or under the age of 12 weeks, more preferably up to or under the age of 8 weeks, and even more preferably up to or under the age of 4 weeks. In certain embodiments, a neonatal human subject is up to 4 weeks of age. In certain embodiments, a neonatal human subject is up to 8 weeks of age. In another embodiment, a neonatal human subject is within 3 weeks after birth. In another embodiment, a neonatal human subject is within 2 weeks after birth. In another embodiment, a neonatal human subject is within 1 week after birth. In another embodiment, a neonatal human subject is within 7 days after birth. In another embodiment, a neonatal human subject is within 6 days after birth. In another embodiment, a neonatal human subject is within 5 days after birth. In another embodiment, a neonatal human subject is within 4 days after birth. In another embodiment, a neonatal human subject is within 3 days after birth. In another embodiment, a neonatal human subject is within 2 days after birth. In another embodiment, a neonatal human subject is within 1 day after birth. The time windows disclosed above are for human subjects and are also meant to cover the corresponding developmental time windows for other animals.

[0604] Neonatal cells can be cells of any neonatal subject. For example, they can be of a human subject up to or under the age of 1 year (52 weeks), preferably up to or under the age of 24 weeks, more preferably up to or under the age of 12 weeks, more preferably up to or under the age of 8 weeks, and even more preferably up to or under the age of 4 weeks. In certain embodiments, a neonatal human subject is up to 4 weeks of age. In certain embodiments, a neonatal human subject is up to 8 weeks of age. In another embodiment, a neonatal human subject is within 3 weeks after birth. In another embodiment, a neonatal human subject is within 2 weeks after birth. In another embodiment, a neonatal human subject is within 1 week after birth. In another embodiment, a neonatal human subject is within 7 days after birth. In another embodiment, a neonatal human subject is within 6 days after birth. In another embodiment, a neonatal human subject is within 5 days after birth. In another embodiment, a neonatal human subject is within 4 days after birth. In another embodiment, a neonatal human subject is within 3 days after birth. In another embodiment, a neonatal human subject is within 2 days after birth. In another embodiment, a neonatal human subject is within 1 day after birth. The time windows disclosed above are for human subjects and are also meant to cover the corresponding developmental time windows for other animals.

[0605] In some such cells or animals or genomes, a nucleic acid construct encoding a multidomain therapeutic protein can be genomically integrated at a target genomic locus, such as a safe harbor locus (e.g., an ALB locus or a human ALB locus, such as intron 1 of an ALB locus or a human ALB locus). In some such cells, animals, or genomes, the multidomain therapeutic protein encoded by the nucleic acid construct is expressed in the cell, animal, or genome. For example, if the nucleic acid construct encoding a multidomain therapeutic protein is integrated into an ALB locus (e.g., intron 1 of a human ALB locus), the multidomain therapeutic protein can be expressed from the ALB locus. The coding sequence for the multidomain therapeutic protein can be operably linked to an endogenous promoter at the target genomic locus upon integration into the target genomic locus, or it can be operably linked to an exogenous promoter present in the nucleic acid construct. If the nucleic acid construct is a bidirectional nucleic acid construct disclosed herein, the genome, cell, or animal can express the first multidomain therapeutic protein or can express the second multidomain therapeutic protein. In some genomes, cells, or animals, the target genomic locus is an ALB locus. For example, the nucleic acid construct can be genomically integrated in intron 1 of the endogenous ALB locus. Endogenous ALB exon 1 can then splice into the coding sequence for the multidomain therapeutic protein in the nucleic acid construct. In some cells, the percentage of unintended transcripts from the target genomic locus containing comprising the integrated nucleic acid construct or coding sequence for the multidomain therapeutic protein is less than about 10%, less than about 9%, less than about 8%, less than about 7%, less than about 6%, less than about 5%, less than about 4%, less than about 3%, less than about 2%, or less than about 1%. In some cells, the percentage of unintended transcripts from the target genomic locus containing comprising the inserted nucleic acid construct or coding sequence for the multidomain therapeutic protein is less than about 5%. In some cells, the percentage of unintended transcripts from the target genomic locus containing comprising the inserted nucleic acid construct or coding sequence for the multidomain therapeutic protein is less than about 4%. In some cells, the percentage of unintended transcripts from the target genomic locus containing comprising the inserted nucleic acid construct or coding sequence for the multidomain therapeutic protein is less than about 3%. In some cells, the percentage of unintended transcripts from the target genomic locus containing comprising the inserted nucleic acid construct or coding sequence for the multidomain therapeutic protein is less than about 2%. In some cells, the percentage of unintended transcripts from the target genomic locus containing comprising the inserted nucleic acid construct or coding sequence for the multidomain therapeutic protein is less than about 1%. The percentage of unintended transcripts means the percentage of all transcripts from the target genomic locus with the inserted nucleic acid construct or coding sequence for the multidomain therapeutic protein that are unintended transcripts and not the intended transcript from the nucleic acid construct being inserted (e.g., transcripts formed by splicing from cryptic splice donors or into cryptic splice acceptors).

[0606] The target genomic locus at which the nucleic acid construct is stably integrated can be heterozygous for the nucleic acid construct encoding a multidomain therapeutic protein or homozygous for the nucleic acid construct encoding a multidomain therapeutic protein. A diploid organism has two alleles at each genetic locus. Each pair of alleles represents the genotype of a specific genetic locus. Genotypes are described as homozygous if there are two identical alleles at a particular locus and as heterozygous if the two alleles differ.

[0607] The cells, animals, or genomes can be from any suitable species, such as eukaryotic cells or eukaryotes, or mammalian cells or mammals (e.g., non-human mammalian cells or non-human mammals, or human cells or humans). A mammal can be, for example, a non-human mammal, a human, a rodent, a rat, a mouse, or a hamster. Other non-human mammals include, for example, non-human primates, e.g., monkeys and apes. The term “non-human” excludes humans. Examples include, but are not limited to, human cells/humans, rodent cells/rodents, mouse cells/mice, rat cells/rats, and non-human primate cells/non-human primates. In a specific example, the cell is a human cell or the animal is a human. Likewise, cells can be any suitable type of cell. In a specific example, the cell is a liver cell such as a hepatocyte (e.g., a human liver cell or human hepatocyte).

[0608] The cells can be isolated cells (e.g., in vitro), ex vivo cells, or can be in vivo within an animal (i.e., in a subject). The cells can be mitotically competent cells or mitotically-inactive cells, meiotically competent cells or meiotically-inactive cells. Similarly, the cells can also be primary somatic cells or cells that are not a primary somatic cell. Somatic cells include any cell that is not a gamete, germ cell, gametocyte, or undifferentiated stem cell. For example, the cells can be liver cells, such as hepatocytes (e.g., mouse, non-human primate, or human hepatocytes).

[0609] The cells provided herein can be normal, healthy cells, or can be diseased or mutant-bearing cells. For example, the cells can have a GAA deficiency or can be from a subject with a GAA deficiency. For example, the cells can have a GAA deficiency, can carry a mutation that results in a GAA deficiency, or can be from a subject with a GAA deficiency carrying a mutation that results in a GAA deficiency, or Pompe disease. In some embodiments, the cells are of a neonatal subject.

[0610] The cells provided herein can be dividing cells (e.g., actively dividing cells). Alternatively, the cells provided herein can be non-dividing cells.

### III. Therapeutic Methods and Methods for Introducing, Integrating, or Expressing a Nucleic Acid Encoding a Multidomain Therapeutic Protein in Cells or Subjects

[0611] The multidomain therapeutic protein nucleic acid constructs and compositions disclosed herein can be used in methods of introducing a nucleic acid construct encoding a multidomain therapeutic protein into a cell or a population of cells or a subject (e.g., in a cell or population of cells in a subject), methods of inserting or integrating a nucleic acid encoding a multidomain therapeutic protein into a target genomic locus in a cell or a population of cells or a subject (e.g., in a cell or population of cells in a subject), methods of expressing a multidomain therapeutic protein in a cell or a population of cells or a subject (e.g., in a cell or population of cells in a subject), methods of reducing glycogen accumulation in a cell or a population of cells or a tissue in a subject (e.g., in a cell or population of cells in a subject), methods of treating Pompe disease or GAA deficiency in a subject, and methods or preventing or reducing the onset of a sign or symptom of Pompe disease or GAA deficiency in a subject. In some methods, the percentage of unintended transcripts from the target genomic locus containing comprising the inserted nucleic acid construct or coding sequence for the multidomain therapeutic protein is less than about 10%, less than about 9%, less than about 8%, less than about 7%, less than about 6%, less than about 5%, less than about 4%, less than about 3%, less than about 2%, or less than about 1%. In some methods, the percentage of unintended transcripts from the target genomic locus containing comprising the inserted nucleic acid construct or coding sequence for the multidomain therapeutic protein is less than about 5%. In some methods, the percentage of unintended transcripts from the target genomic locus containing comprising the inserted nucleic acid construct or coding sequence for the multidomain therapeutic protein is less than about 4%. In some methods, the percentage of unintended transcripts from the target genomic locus containing comprising the inserted nucleic acid construct or coding sequence for the multidomain therapeutic protein is less than about 3%. In some methods, the percentage of unintended transcripts from the target genomic locus containing comprising the inserted nucleic acid construct or coding sequence for the multidomain therapeutic protein is less than about 2%. In some methods, the percentage of unintended transcripts from the target genomic locus containing comprising the inserted nucleic acid construct or coding sequence for the multidomain therapeutic protein is less than about 1%. The percentage of unintended transcripts means the percentage of all transcripts from the target genomic locus with the inserted nucleic acid construct or coding sequence for the multidomain therapeutic protein that are unintended transcripts and not the intended transcript from the nucleic acid construct being inserted (e.g., transcripts formed by splicing from cryptic splice donors or into cryptic splice acceptors).

[0612] The multidomain therapeutic protein compositions disclosed herein (e.g., multidomain therapeutic protein nucleic acid constructs, or multidomain therapeutic protein nucleic acid constructs in combination with the nuclease agents (e.g., CRISPR/Cas systems)) are useful for the treatment of GAA deficiency or Pompe disease and/or ameliorating at least one symptom associated with GAA deficiency or Pompe disease (e.g., as compared to a control, untreated subject). The multidomain therapeutic protein compositions disclosed herein (e.g., multidomain therapeutic protein nucleic acid constructs, or multidomain therapeutic protein nucleic acid constructs in combination with the nuclease agents (e.g., CRISPR/Cas systems)) are also useful for preventing or reducing the onset of a sign or symptom of GAA deficiency or Pompe disease (e.g., as compared to a control, untreated subject). Likewise, the compositions disclosed herein can be used for the preparation of a pharmaceutical composition or medicament for treating a subject having GAA deficiency or Pompe disease.

[0613] With respect to GAA deficiency or Pompe disease, the terms “treat,” “treated,” “treating,” and “treatment,” include the administration of the multidomain therapeutic domain nucleic acid constructs disclosed herein (e.g., together with a nuclease agent disclosed herein) to subjects to prevent or delay the onset of the symptoms, complications, or biochemical indicia of GAA deficiency or Pompe disease, alleviating the symptoms or arresting or inhibiting further development of GAA deficiency or Pompe disease. Treatment may be prophylactic (to prevent or delay the onset of GAA deficiency or Pompe disease, or to prevent the manifestation of clinical or subclinical symptoms thereof) or therapeutic suppression or alleviation of symptoms after the manifestation of GAA deficiency or Pompe disease.

[0614] GAA deficiency refers expression and/or activity levels of GAA being lower in the subject (e.g., neonatal subject) than normal GAA expression and/or activity levels, such that the normal functions of GAA are not fully carried out in the subject (e.g., resulting in Pompe disease). Pompe disease is also known as acid maltase deficiency, acid maltase deficiency disease, alpha-1,4-glucosidase deficiency, AMD, deficiency of alpha-glucosidase, GAA deficiency, glycogen storage disease type II, glycogenosis type II, GSD II, GSD2, and Pompe's disease.

[0615] Pompe disease is an inherited disorder caused by the buildup of glycogen in the body's cells. The accumulation of glycogen in certain organs and tissues, especially muscles, impairs their ability to function normally. Different types of Pompe disease differ in severity and the age at which they appear. These types are known as infantile-onset Pompe disease (classic infantile-onset, and non-classic infantile-onset) and late-onset Pompe disease. Subjects with late-onset Pompe disease have higher GAA enzyme levels than are found in infantile-onset forms of the disease, but generally less than 40 percent of normal enzyme activity. Classic infantile-onset Pompe disease patients typically have less than 1 percent of GAA enzyme activity, while those with non-classic forms usually have less than 10 percent.

[0616] The classic form of infantile-onset Pompe disease begins within a few months of birth. Some phenotypes, such as cardiomyopathies, can be present at birth. Infants with this disorder typically experience muscle weakness (myopathy), poor muscle tone (hypotonia), an enlarged liver (hepatomegaly), and heart defects. Affected infants may also fail to gain weight and grow at the expected rate (failure to thrive) and have breathing problems. If untreated, this form of Pompe disease leads to death from heart failure in the first year of life.

[0617] The non-classic form of infantile-onset Pompe disease usually appears by age 1. It is characterized by delayed motor skills (such as rolling over and sitting) and progressive muscle weakness. The heart may be abnormally large (cardiomegaly), but affected individuals usually do not experience heart failure. The muscle weakness in this disorder leads to serious breathing problems, and most children with non-classic infantile-onset Pompe disease live only into early childhood.

[0618] The late-onset type of Pompe disease may not become apparent until later in childhood, adolescence, or adulthood. Late-onset Pompe disease is usually milder than the infantile-onset forms of this disorder and is less likely to involve the heart. Most individuals with late-onset Pompe disease experience progressive muscle weakness, especially in the legs and the trunk, including the muscles that control breathing. As the disorder progresses, breathing problems can lead to respiratory failure.

[0619] Mutations in the GAA gene can cause Pompe disease. The GAA gene encodes an enzyme called alpha-glucosidase. This enzyme is active in lysosomes. The enzyme normally breaks down glycogen into glucose. Mutations in the GAA gene prevent acid alpha-glucosidase from breaking down glycogen effectively, which allows this sugar to build up to toxic levels in lysosomes. This buildup damages organs and tissues throughout the body, particularly the muscles, leading to the progressive signs and symptoms of Pompe disease.

[0620] Since this is a genetic condition, the people who get this disease inherit it from a parent. It is common, however, that neither parent shows any symptoms. The disease is rare. In the United States, only 1 person in 40,000 is affected by Pompe disease. It can affect both males and females of all ethnic groups.

[0621] Symptoms of Pompe disease can be different, depending on when the disease makes itself present. For classic type, infant symptoms can include the following: weak muscles, poor muscle tone, enlarged liver, failure to gain weight and grow at the expected rate (failure to thrive), trouble breathing, feeding problems, infections in the respiratory system, and problems with hearing. For non-classic type, infant symptoms can include the following: motor skills delayed (such as rolling over and sitting), muscles get steadily weaker, abnormally large heart, and breathing problems. For late-onset type, symptoms can include the following: the legs and the trunk get steadily weaker, breathing problems, enlarged heart, increasing difficulty in walking, muscle pain over a large area, loss of the ability to exercise, falling often, frequent lung infections, shortness of breath when the person pushes himself or herself, headaches in the morning, becoming tired during the day, losing weight, cannot swallow as easily as before, irregular heartbeat, increased difficulty hearing, and higher levels of creatine kinase.

[0622] Pathology in Pompe disease can begin long before subjects present with symptoms. Pompe disease can be diagnosed by taking a blood sample, and enzymes in the blood are studied and counted. Confirmation can be made via DNA testing. For example, GAA enzyme activity can be measured by flow-injection tandem mass spectrometry, and full sequencing of the GAA gene is performed in newborns with low GAA enzyme activity. See, e.g., Ficicioglu et al. (2020) Int. J. Neonatal Screen. 6(4):89, Tang et al. (2020) Int. J. Neonatal Screen. 6(1):9, and Klug et al. (2020) Int. J. Neonatal Screen 6(1):11, each of which is herein incorporated by reference in its entirety for all purposes. GAA activity can be assessed by any known method. For example, to assess GAA activity (or deficiencies of activity), blood-based assays can measure GAA activity in dried blood spots or fresh blood. GAA activity can also be measured in fibroblasts from a skin biopsy or muscle biopsy. Other secondary measures can be measuring urine glucose tetrasaccharides by mass spectrometry. These can be combined with genetic analyses to diagnose in infantile and late onset Pompe disease. Asymptomatic subjects can be considered to have Pompe disease if diagnosed by genetic screening. For example, a subject described herein is considered to have Pompe disease, even if they are asymptomatic, if they have reduced GAA activity and a pathogenic GAA variant or mutation. Pathogenic GAA mutations and variants associated with Pompe disease are known. See, e.g., Ficicioglu et al. (2020) Int. J. Neonatal Screen. 6(4):89, Tang et al. (2020) Int. J. Neonatal Screen. 6(1):9, and Klug et al. (2020) Int. J. Neonatal Screen 6(1):11, each of which is herein incorporated by reference in its entirety for all purposes.

[0623] As is the case for several other lysosomal diseases, Pompe disease is currently treated by enzyme replacement therapy (ERT). Recombinant human GAA is delivered by intravenous infusion into patients every other week. While ERT has been successful in treating the cardiac manifestations of Pompe disease, skeletal muscle and the central nervous system (CNS) remain minimally treated by ERT.

[0624] The cells or populations of cells can be neonatal cells or populations of neonatal cells, and the subject can be neonatal subjects in some methods of introducing a nucleic acid construct encoding a multidomain therapeutic protein into a cell or a population of cells or a subject (e.g., in a cell or population of cells in a subject), methods of inserting or integrating a nucleic acid encoding the multidomain therapeutic protein into a target genomic locus in a cell or a population of cells or a subject (e.g., in a cell or population of cells in a subject), methods of expressing a multidomain therapeutic protein in a cell or a population of cells or a subject (e.g., in a cell or population of cells in a subject), methods of reducing glycogen accumulation in a cell or a population of cells or a tissue in a subject (e.g., in a cell or population of cells in a subject), and methods of treating Pompe disease or GAA deficiency in a subject. A neonatal subject can be a human subject up to or under the age of 1 year (52 weeks), preferably up to or under the age of 24 weeks, more preferably up to or under the age of 12 weeks, more preferably up to or under the age of 8 weeks, and even more preferably up to or under the age of 4 weeks. In certain embodiments, a neonatal human subject is up to 4 weeks of age. In certain embodiments, a neonatal human subject is up to 8 weeks of age. In another embodiment, a neonatal human subject is within 3 weeks after birth. In another embodiment, a neonatal human subject is within 2 weeks after birth. In another embodiment, a neonatal human subject is within 1 week after birth. In another embodiment, a neonatal human subject is within 7 days after birth. In another embodiment, a neonatal human subject is within 6 days after birth. In another embodiment, a neonatal human subject is within 5 days after birth. In another embodiment, a neonatal human subject is within 4 days after birth. In another embodiment, a neonatal human subject is within 3 days after birth. In another embodiment, a neonatal human subject is within 2 days after birth. In another embodiment, a neonatal human subject is within 1 day after birth. The time windows disclosed above are for human subjects and are also meant to cover the corresponding developmental time windows for other animals. As used herein, a “neonatal cell” is a cell of a neonatal subject, and a population of neonatal cells is a population of cells of a neonatal subject. In other methods, the cells or populations of cells are not neonatal cells and are not populations of neonatal cells, and the subjects are not neonatal subjects.

[0625] In one example, provided herein are methods of introducing a nucleic acid encoding a multidomain therapeutic protein into a cell or a population of cells or a subject in need thereof (e.g., in a cell or a population of cells in the subject). The cells or populations of cells can be neonatal cells or populations of neonatal cells, and the subject can be neonatal subjects in some methods. In other methods, the cells or populations of cells are not neonatal cells and are not populations of neonatal cells, and the subjects are not neonatal subjects. Such methods can comprise administering any of the multidomain therapeutic protein nucleic acid constructs described herein (or any of the compositions comprising a multidomain therapeutic protein nucleic acid construct described herein, including, for example, vectors or lipid nanoparticles) to the cell. The multidomain therapeutic protein nucleic acid construct can be administered together with a nuclease agent described herein, or can be administered alone. For example, the multidomain therapeutic protein nucleic acid construct can be one that expresses the multidomain therapeutic protein without being integrated into target genomic locus (e.g., an episomal vector or an expression vector in which the coding sequence for the multidomain therapeutic protein is operably linked to a promoter). In some methods, the multidomain therapeutic protein nucleic acid construct can be administered together with a nuclease agent described herein (e.g., simultaneously or sequentially in any order). The nuclease agent can cleave a nuclease target sequence within a target genomic locus (e.g., target gene), the nucleic acid encoding the multidomain therapeutic protein can be inserted into the target genomic locus to create a modified target genomic locus, and the multidomain therapeutic protein can be expressed from the modified target genomic locus. The multidomain therapeutic protein coding sequence can be operably linked to an endogenous promoter at the target genomic locus upon integration into the target genomic locus, or it can be operably linked to an exogenous promoter present in the nucleic acid construct. In one example, the nuclease agent is a CRISPR/Cas system, and the target gene is ALB (e.g., intron 1 of ALB). In such methods, the guide RNA can bind to the Cas protein and target the Cas protein to the guide RNA target sequence in intron 1 of the ALB gene, the Cas protein can cleave the guide RNA target sequence, the nucleic acid encoding the multidomain therapeutic protein can be inserted into the ALB gene to create a modified ALB gene, and multidomain therapeutic protein can be expressed from the modified ALB gene.

[0626] In another example, provided herein are methods of expressing a multidomain therapeutic protein in a cell or a population of cells or a subject in need thereof (e.g., in a cell or a population of cells in the subject). The cells or populations of cells can be neonatal cells or populations of neonatal cells, and the subject can be neonatal subjects in some methods. In other methods, the cells or populations of cells are not neonatal cells and are not populations of neonatal cells, and the subjects are not neonatal subjects. Such methods can comprise administering any of the multidomain therapeutic protein nucleic acid constructs described herein (or any of the compositions comprising a multidomain therapeutic protein nucleic acid construct described herein, including, for example, vectors or lipid nanoparticles) to the cell. In some methods, the multidomain therapeutic protein nucleic acid construct or composition comprising the multidomain therapeutic protein nucleic acid construct can be administered without a nuclease agent (e.g., if the multidomain therapeutic protein nucleic acid construct comprises elements needed for expression of the multidomain therapeutic protein without integration into a target genomic locus). In some methods, the multidomain therapeutic protein nucleic acid construct can be administered together with a nuclease agent described herein (e.g., simultaneously or sequentially in any order). The nuclease agent can cleave a nuclease target sequence within a target genomic locus (e.g., target gene), the nucleic acid encoding the multidomain therapeutic protein can be inserted into the target genomic locus to create a modified target genomic locus, and multidomain therapeutic protein can be expressed from the modified target genomic locus. The multidomain therapeutic protein coding sequence can be operably linked to an endogenous promoter at the target genomic locus upon integration into the target genomic locus, or it can be operably linked to an exogenous promoter present in the nucleic acid construct. In one example, the nuclease agent is a CRISPR/Cas system, and the target gene is ALB (e.g., intron 1 of ALB). In such methods, the guide RNA can bind to the Cas protein and target the Cas protein to the guide RNA target sequence in intron 1 of the ALB gene, the Cas protein can cleave the guide RNA target sequence, the nucleic acid encoding the multidomain therapeutic protein can be inserted into the ALB gene to create a modified ALB gene, and multidomain therapeutic protein can be expressed from the modified ALB gene.

[0627] In another example, provided herein are methods of inserting or integrating a nucleic acid encoding the multidomain therapeutic protein into a target genomic locus in a cell or a population of cells or a subject in need thereof (e.g., in a cell or a population of cells in the subject). The cells or populations of cells can be neonatal cells or populations of neonatal cells, and the subject can be neonatal subjects in some methods. In other methods, the cells or populations of cells are not neonatal cells and are not populations of neonatal cells, and the subjects are not neonatal subjects. Such methods can comprise administering any of the multidomain therapeutic protein nucleic acid constructs described herein (or any of the compositions comprising a multidomain therapeutic protein nucleic acid construct described herein, including, for example, vectors or lipid nanoparticles) to the cell. In some methods, the multidomain therapeutic protein nucleic acid construct or composition comprising the multidomain therapeutic protein nucleic acid construct can be administered together with a nuclease agent described herein (e.g., simultaneously or sequentially in any order). The nuclease agent can cleave a nuclease target sequence within a target genomic locus (e.g., target gene), the nucleic acid encoding the multidomain therapeutic protein can be inserted into the target genomic locus to create a modified target genomic locus, and the multidomain therapeutic protein can be expressed from the modified target genomic locus. The multidomain therapeutic protein coding sequence can be operably linked to an endogenous promoter at the target genomic locus upon integration into the target genomic locus, or it can be operably linked to an exogenous promoter present in the nucleic acid construct. In one example, the nuclease agent is a CRISPR/Cas system, and the target gene is ALB (e.g., intron 1 of ALB). In such methods, the guide RNA can bind to the Cas protein and target the Cas protein to the guide RNA target sequence in intron 1 of the ALB gene, the Cas protein can cleave the guide RNA target sequence, the nucleic acid encoding the multidomain therapeutic protein can be inserted into the ALB gene to create a modified ALB gene, and multidomain therapeutic protein can be expressed from the modified ALB gene.

[0628] In any of the above methods, the cells can be from any suitable species, such as eukaryotic cells or mammalian cells (e.g., non-human mammalian cells or human cells). A mammal can be, for example, a non-human mammal, a human, a rodent, a rat, a mouse, or a hamster. Other non-human mammals include, for example, non-human primates, e.g., monkeys and apes. The term “non-human” excludes humans. Specific examples include, but are not limited to, human cells, rodent cells, mouse cells, rat cells, and non-human primate cells. In a specific example, the cell is a human cell. Likewise, cells can be any suitable type of cell. In a specific example, the cell is a liver cell such as a hepatocyte (e.g., a human liver cell or human hepatocyte). The cells can be neonatal cells, or they can be non-neonatal cells.

[0629] The cells can be isolated cells (e.g., in vitro), ex vivo cells, or can be in vivo within an animal (i.e., in a subject). In a specific example, the cell is in vivo (e.g., in a subject having a GAA deficiency or Pompe disease). The cells can be mitotically competent cells or mitotically-inactive cells, meiotically competent cells or meiotically-inactive cells. Similarly, the cells can also be primary somatic cells or cells that are not a primary somatic cell. Somatic cells include any cell that is not a gamete, germ cell, gametocyte, or undifferentiated stem cell. For example, the cells can be liver cells, such as hepatocytes (e.g., mouse, non-human primate, or human hepatocytes).

[0630] The cells provided herein can be normal, healthy cells, or can be diseased or mutant-bearing cells. For example, the cells can have a GAA deficiency or can be from a subject with GAA deficiency or Pompe disease.

[0631] Also provided are methods of treating a lysosomal alpha-glucosidase (GAA) deficiency in a subject in need thereof (e.g., a subject with Pompe disease). The Pompe disease can be any type of Pompe disease (e.g., infantile-onset Pompe disease (classic infantile-onset or non-classic infantile-onset) or late-onset Pompe disease). For example, the subject can have infantile-onset Pompe disease (e.g., classical infantile-onset Pompe disease). Pompe disease is described in more detail elsewhere herein. In some methods, the expressed multidomain therapeutic protein is delivered to and internalized by skeletal muscle, liver, or heart tissue in the subject. In some methods, the expressed multidomain therapeutic protein is delivered to and internalized by skeletal muscle or heart tissue in the subject. In some methods, the expressed multidomain therapeutic protein is delivered to and internalized by skeletal muscle tissue in the subject. In some methods, the expressed multidomain therapeutic protein is delivered to and internalized by liver tissue in the subject. In some methods, the expressed multidomain therapeutic protein is delivered to and internalized by heart tissue in the subject. In some methods, the expressed multidomain therapeutic protein is delivered to and internalized by skeletal muscle, liver, and heart tissue in the subject. In some methods, the expressed multidomain therapeutic protein is delivered to and internalized by skeletal muscle and heart tissue in the subject. In some methods, the expressed multidomain therapeutic protein is delivered to and internalized by skeletal muscle, liver, heart, or central nervous system tissue in the subject. In some methods, the expressed multidomain therapeutic protein is delivered to and internalized by skeletal muscle, heart, or central nervous system tissue in the subject. In some methods, the expressed multidomain therapeutic protein is delivered to and internalized by skeletal muscle tissue in the subject. In some methods, the expressed multidomain therapeutic protein is delivered to and internalized by liver tissue in the subject. In some methods, the expressed multidomain therapeutic protein is delivered to and internalized by heart tissue in the subject. In some methods, the expressed multidomain therapeutic protein is delivered to and internalized by central nervous system tissue in the subject. In some methods, the expressed multidomain therapeutic protein is delivered to and internalized by skeletal muscle, liver, heart, and central nervous system tissue in the subject. In some methods, the expressed multidomain therapeutic protein is delivered to and internalized by skeletal muscle, heart, and central nervous system tissue in the subject. In some methods, the method reduces glycogen accumulation in skeletal muscle, liver, or heart tissue in the subject. In some methods, the method reduces glycogen accumulation in skeletal muscle or heart tissue in the subject. In some methods, the method reduces glycogen accumulation in skeletal muscle tissue in the subject. In some methods, the method reduces glycogen accumulation in liver tissue in the subject. In some methods, the method reduces glycogen accumulation in heart tissue in the subject. For example, glycogen accumulation can be reduced in skeletal muscle, liver, and heart tissue in the subject. For example, glycogen accumulation can be reduced in skeletal muscle and heart tissue in the subject. In some methods, the method reduces glycogen accumulation in skeletal muscle, liver, heart, or central nervous system tissue in the subject. In some methods, the method reduces glycogen accumulation in skeletal muscle, heart, or central nervous system tissue in the subject. In some methods, the method reduces glycogen accumulation in skeletal muscle tissue in the subject. In some methods, the method reduces glycogen accumulation in liver tissue in the subject. In some methods, the method reduces glycogen accumulation in heart tissue in the subject. In some methods, the method reduces glycogen accumulation in central nervous system tissue in the subject. For example, glycogen accumulation can be reduced in skeletal muscle, liver, heart, and central nervous system tissue in the subject. For example, glycogen accumulation can be reduced in skeletal muscle, heart, and central nervous system tissue in the subject. In some cases, glycogen levels are reduced to wild type levels. In some cases, glycogen levels in skeletal muscle, heart, and/or central nervous system tissue are reduced to levels comparable to wild type levels at the same age. In some methods, the method improves muscle strength in the subject (e.g., restores muscle strength to wild type levels). In some methods, the method prevents loss of muscle strength in the subject compared to a control. In some methods, the method results in the subject having muscle strength comparable to wild type levels at the same age. Such methods can comprise administering any of the multidomain therapeutic protein nucleic acid constructs described herein (or any of the compositions comprising a multidomain therapeutic protein nucleic acid construct described herein, including, for example, vectors or lipid nanoparticles) to the subject such that a therapeutically effective level of multidomain therapeutic protein or GAA expression or a therapeutically effective level of circulating multidomain therapeutic protein or GAA is achieved in the subject. In some methods, the multidomain therapeutic protein nucleic acid construct or composition comprising the multidomain therapeutic protein nucleic acid construct can be administered without a nuclease agent (e.g., if the multidomain therapeutic protein nucleic acid construct comprises elements needed for expression of multidomain therapeutic protein without integration into a target genomic locus). In some methods, the multidomain therapeutic protein nucleic acid construct can be administered together with a nuclease agent described herein (e.g., simultaneously or sequentially in any order). The nuclease agent can cleave a nuclease target sequence within a target genomic locus (e.g., target gene), the nucleic acid encoding the multidomain therapeutic protein can be inserted into the target genomic locus to create a modified target genomic locus, and the multidomain therapeutic protein can be expressed from the modified target genomic locus (e.g., such that a therapeutically effective level of multidomain therapeutic protein or GAA expression or a therapeutically effective level of circulating multidomain therapeutic protein or GAA is achieved in the subject). The multidomain therapeutic protein coding sequence can be operably linked to an endogenous promoter at the target genomic locus upon integration into the target genomic locus, or it can be operably linked to an exogenous promoter present in the nucleic acid construct. In one example, the nuclease agent is a CRISPR/Cas system, and the target gene is ALB (e.g., intron 1 of ALB). In such methods, the guide RNA can bind to the Cas protein and target the Cas protein to the guide RNA target sequence in intron 1 of the ALB gene, the Cas protein can cleave the guide RNA target, the nucleic acid encoding the multidomain therapeutic protein can be inserted into the ALB gene to create a modified ALB gene, and multidomain therapeutic protein can be expressed from the modified ALB gene (e.g., such that a therapeutically effective level of multidomain therapeutic protein or GAA expression or a therapeutically effective level of circulating multidomain therapeutic protein or GAA is achieved in the subject).

[0632] Also provided are methods of reducing glycogen accumulation in a cell or a population of cells or a tissue in a subject in need thereof (e.g., a subject with Pompe disease). Similarly, provided are methods of reducing glycogen accumulation in a cell or a population of cells. The Pompe disease can be any type of Pompe disease (e.g., infantile-onset Pompe disease (classic infantile-onset or non-classic infantile-onset) or late-onset Pompe disease). For example, the subject can have infantile-onset Pompe disease (e.g., classical infantile-onset Pompe disease). Pompe disease is described in more detail elsewhere herein. In some methods, the method reduces glycogen accumulation in skeletal muscle, liver, or heart tissue in the subject. In some methods, the method reduces glycogen accumulation in skeletal muscle or heart tissue in the subject. In some methods, the method reduces glycogen accumulation in skeletal muscle tissue in the subject. In some methods, the method reduces glycogen accumulation in liver tissue in the subject. In some methods, the method reduces glycogen accumulation in heart tissue in the subject. For example, glycogen accumulation can be reduced in skeletal muscle, liver, and heart tissue in the subject. For example, glycogen accumulation can be reduced in skeletal muscle and heart tissue in the subject. In some methods, the method reduces glycogen accumulation in skeletal muscle, liver, heart, or central nervous system tissue in the subject. In some methods, the method reduces glycogen accumulation in skeletal muscle, heart, or central nervous system tissue in the subject. In some methods, the method reduces glycogen accumulation in skeletal muscle tissue in the subject. In some methods, the method reduces glycogen accumulation in liver tissue in the subject. In some methods, the method reduces glycogen accumulation in heart tissue in the subject. In some methods, the method reduces glycogen accumulation in central nervous system tissue in the subject. For example, glycogen accumulation can be reduced in skeletal muscle, liver, heart, and central nervous system tissue in the subject. For example, glycogen accumulation can be reduced in skeletal muscle, heart, and central nervous system tissue in the subject. In some cases, glycogen levels are reduced to wild type levels. In some cases, glycogen levels in skeletal muscle, heart, and/or central nervous system tissue are reduced to levels comparable to wild type levels at the same age. In some methods, the method improves muscle strength in the subject (e.g., restores muscle strength to wild type levels). In some methods, the method prevents loss of muscle strength in the subject compared to a control. In some methods, the method results in the subject having muscle strength comparable to wild type levels at the same age. Such methods can comprise administering any of the multidomain therapeutic protein nucleic acid constructs described herein (or any of the compositions comprising a multidomain therapeutic protein nucleic acid construct described herein, including, for example, vectors or lipid nanoparticles) to the subject such that a therapeutically effective level of multidomain therapeutic protein or GAA expression or a therapeutically effective level of circulating multidomain therapeutic protein or GAA is achieved in the subject. In some methods, the multidomain therapeutic protein nucleic acid construct or composition comprising the multidomain therapeutic protein nucleic acid construct can be administered without a nuclease agent (e.g., if the multidomain therapeutic protein nucleic acid construct comprises elements needed for expression of multidomain therapeutic protein without integration into a target genomic locus). In some methods, the multidomain therapeutic protein nucleic acid construct can be administered together with a nuclease agent described herein (e.g., simultaneously or sequentially in any order). The nuclease agent can cleave a nuclease target sequence within a target genomic locus (e.g., target gene), the nucleic acid encoding the multidomain therapeutic protein can be inserted into the target genomic locus to create a modified target genomic locus, and the multidomain therapeutic protein can be expressed from the modified target genomic locus (e.g., such that a therapeutically effective level of multidomain therapeutic protein or GAA expression or a therapeutically effective level of circulating multidomain therapeutic protein or GAA is achieved in the subject). The multidomain therapeutic protein coding sequence can be operably linked to an endogenous promoter at the target genomic locus upon integration into the target genomic locus, or it can be operably linked to an exogenous promoter present in the nucleic acid construct. In one example, the nuclease agent is a CRISPR/Cas system, and the target gene is ALB (e.g., intron 1 of ALB). In such methods, the guide RNA can bind to the Cas protein and target the Cas protein to the guide RNA target sequence in intron 1 of the ALB gene, the Cas protein can cleave the guide RNA target, the nucleic acid encoding the multidomain therapeutic protein can be inserted into the ALB gene to create a modified ALB gene, and multidomain therapeutic protein can be expressed from the modified ALB gene (e.g., such that a therapeutically effective level of multidomain therapeutic protein or GAA expression or a therapeutically effective level of circulating multidomain therapeutic protein or GAA is achieved in the subject).

[0633] Also provided are methods of treating Pompe disease in a subject. The Pompe disease can be any type of Pompe disease (e.g., infantile-onset Pompe disease (classic infantile-onset or non-classic infantile-onset) or late-onset Pompe disease). For example, the subject can have infantile-onset Pompe disease (e.g., classical infantile-onset Pompe disease). Pompe disease is described in more detail elsewhere herein. In some methods, the method reduces glycogen accumulation in skeletal muscle, liver, or heart tissue in the subject. In some methods, the method reduces glycogen accumulation in skeletal muscle or heart tissue in the subject. In some methods, the method reduces glycogen accumulation in skeletal muscle tissue in the subject. In some methods, the method reduces glycogen accumulation in liver tissue in the subject. In some methods, the method reduces glycogen accumulation in heart tissue in the subject. For example, glycogen accumulation can be reduced in skeletal muscle, liver, and heart tissue in the subject. For example, glycogen accumulation can be reduced in skeletal muscle and heart tissue in the subject. In some methods, the method reduces glycogen accumulation in skeletal muscle, liver, heart, or central nervous system tissue in the subject. In some methods, the method reduces glycogen accumulation in skeletal muscle, heart, or central nervous system tissue in the subject. In some methods, the method reduces glycogen accumulation in skeletal muscle tissue in the subject. In some methods, the method reduces glycogen accumulation in liver tissue in the subject. In some methods, the method reduces glycogen accumulation in heart tissue in the subject. In some methods, the method reduces glycogen accumulation in central nervous system tissue in the subject. For example, glycogen accumulation can be reduced in skeletal muscle, liver, heart, and central nervous system tissue in the subject. For example, glycogen accumulation can be reduced in skeletal muscle, heart, and central nervous system tissue in the subject. In some cases, glycogen levels are reduced to wild type levels. In some cases, glycogen levels in skeletal muscle, heart, and/or central nervous system tissue are reduced to levels comparable to wild type levels at the same age. In some methods, the method improves muscle strength in the subject (e.g., restores muscle strength to wild type levels). In some methods, the method prevents loss of muscle strength in the subject compared to a control. In some methods, the method results in the subject having muscle strength comparable to wild type levels at the same age. Such methods can comprise administering any of the multidomain therapeutic protein nucleic acid constructs described herein (or any of the compositions comprising a multidomain therapeutic protein nucleic acid construct described herein, including, for example, vectors or lipid nanoparticles) to the subject such that a therapeutically effective level of multidomain therapeutic protein or GAA expression or a therapeutically effective level of circulating multidomain therapeutic protein or GAA is achieved in the subject. In some methods, the multidomain therapeutic protein nucleic acid construct or composition comprising the multidomain therapeutic protein nucleic acid construct can be administered without a nuclease agent (e.g., if the multidomain therapeutic protein nucleic acid construct comprises elements needed for expression of multidomain therapeutic protein without integration into a target genomic locus). In some methods, the multidomain therapeutic protein nucleic acid construct can be administered together with a nuclease agent described herein (e.g., simultaneously or sequentially in any order). The nuclease agent can cleave a nuclease target sequence within a target genomic locus (e.g., target gene), the nucleic acid encoding the multidomain therapeutic protein can be inserted into the target genomic locus to create a modified target genomic locus, and the multidomain therapeutic protein can be expressed from the modified target genomic locus (e.g., such that a therapeutically effective level of multidomain therapeutic protein or GAA expression or a therapeutically effective level of circulating multidomain therapeutic protein or GAA is achieved in the subject). The multidomain therapeutic protein coding sequence can be operably linked to an endogenous promoter at the target genomic locus upon integration into the target genomic locus, or it can be operably linked to an exogenous promoter present in the nucleic acid construct. In one example, the nuclease agent is a CRISPR/Cas system, and the target gene is ALB (e.g., intron 1 of ALB). In such methods, the guide RNA can bind to the Cas protein and target the Cas protein to the guide RNA target sequence in intron 1 of the ALB gene, the Cas protein can cleave the guide RNA target, the nucleic acid encoding the multidomain therapeutic protein can be inserted into the ALB gene to create a modified ALB gene, and multidomain therapeutic protein can be expressed from the modified ALB gene (e.g., such that a therapeutically effective level of multidomain therapeutic protein or GAA expression or a therapeutically effective level of circulating multidomain therapeutic protein or GAA is achieved in the subject).

[0634] Treatment refers to any administration or application of a therapeutic for disease or disorder in a subject, and includes inhibiting the disease, arresting its development, relieving one or more symptoms of the disease, curing the disease, or preventing reoccurrence of one or more symptoms of the disease. For example, treatment of Pompe disease may comprise alleviating symptoms of Pompe disease. Pompe disease is described in detail above and refers to a disorder caused by a missing or defective GAA gene or GAA polypeptide. The defective GAA gene or GAA polypeptide can result in reduced GAA expression and/or activity of GAA.

[0635] Also provided are methods of preventing or reducing the onset of a sign or symptom of Pompe disease in a subject (e.g., as compared to an untreated, control subject). By preventing is meant the sign or symptom of the Pompe disease never becomes present. Such signs and symptoms are well-known and are described in more detail elsewhere herein. The Pompe disease can be any type of Pompe disease (e.g., infantile-onset Pompe disease (classic infantile-onset or non-classic infantile-onset) or late-onset Pompe disease). For example, Pompe disease can be infantile-onset Pompe disease (e.g., classical infantile-onset Pompe disease). Pompe disease is described in more detail elsewhere herein. In some methods, the method prevents or reduces glycogen accumulation in skeletal muscle, liver, or heart tissue in the subject. In some methods, the method prevents or reduces glycogen accumulation in skeletal muscle or heart tissue in the subject. In some methods, the method prevents or reduces glycogen accumulation in skeletal muscle tissue in the subject. In some methods, the method prevents or reduces glycogen accumulation in liver tissue in the subject. In some methods, the method prevents or reduces glycogen accumulation in heart tissue in the subject. For example, glycogen accumulation can be prevented or reduced in skeletal muscle, liver, and heart tissue in the subject. For example, glycogen accumulation can be prevented or reduced in skeletal muscle and heart tissue in the subject. In some methods, the method prevents or reduces glycogen accumulation in skeletal muscle, liver, heart, or central nervous system tissue in the subject. In some methods, the method prevents or reduces glycogen accumulation in skeletal muscle, heart, or central nervous system tissue in the subject. In some methods, the method prevents or reduces glycogen accumulation in skeletal muscle tissue in the subject. In some methods, the method prevents or reduces glycogen accumulation in liver tissue in the subject. In some methods, the method prevents or reduces glycogen accumulation in heart tissue in the subject. In some methods, the method prevents or reduces glycogen accumulation in central nervous system tissue in the subject. For example, glycogen accumulation can be prevented or reduced in skeletal muscle, liver, heart, and central nervous system tissue in the subject. For example, the onset of glycogen accumulation can be prevented or reduced in skeletal muscle, heart, and central nervous system tissue in the subject. Such methods can comprise administering any of the multidomain therapeutic protein nucleic acid constructs described herein (or any of the compositions comprising a multidomain therapeutic protein nucleic acid construct described herein, including, for example, vectors or lipid nanoparticles) to the subject such that a therapeutically effective level of multidomain therapeutic protein or GAA expression or a therapeutically effective level of circulating multidomain therapeutic protein or GAA is achieved in the subject. In some methods, the multidomain therapeutic protein nucleic acid construct or composition comprising the multidomain therapeutic protein nucleic acid construct can be administered without a nuclease agent (e.g., if the multidomain therapeutic protein nucleic acid construct comprises elements needed for expression of multidomain therapeutic protein without integration into a target genomic locus). In some methods, the multidomain therapeutic protein nucleic acid construct can be administered together with a nuclease agent described herein (e.g., simultaneously or sequentially in any order). The nuclease agent can cleave a nuclease target sequence within a target genomic locus (e.g., target gene), the nucleic acid encoding the multidomain therapeutic protein can be inserted into the target genomic locus to create a modified target genomic locus, and the multidomain therapeutic protein can be expressed from the modified target genomic locus (e.g., such that a therapeutically effective level of multidomain therapeutic protein or GAA expression or a therapeutically effective level of circulating multidomain therapeutic protein or GAA is achieved in the subject). The multidomain therapeutic protein coding sequence can be operably linked to an endogenous promoter at the target genomic locus upon integration into the target genomic locus, or it can be operably linked to an exogenous promoter present in the nucleic acid construct. In one example, the nuclease agent is a CRISPR/Cas system, and the target gene is ALB (e.g., intron 1 of ALB). In such methods, the guide RNA can bind to the Cas protein and target the Cas protein to the guide RNA target sequence in intron 1 of the ALB gene, the Cas protein can cleave the guide RNA target, the nucleic acid encoding the multidomain therapeutic protein can be inserted into the ALB gene to create a modified ALB gene, and multidomain therapeutic protein can be expressed from the modified ALB gene (e.g., such that a therapeutically effective level of multidomain therapeutic protein or GAA expression or a therapeutically effective level of circulating multidomain therapeutic protein or GAA is achieved in the subject).

[0636] In some methods, a therapeutically effective amount of the multidomain therapeutic protein nucleic acid construct or the composition comprising the multidomain therapeutic protein nucleic acid construct or the combination of the multidomain therapeutic protein nucleic acid construct and the nuclease agent (e.g., CRISPR/Cas system) is administered to the subject. A therapeutically effective amount is an amount that produces the desired effect for which it is administered. The exact amount will depend on the purpose of the treatment, and will be ascertainable by one skilled in the art using known techniques. See, e.g., Lloyd (1999) The Art, Science and Technology of Pharmaceutical Compounding. In a specific example, serum levels of at least about 2 μg/mL or at least about 5 μg/mL of the multidomain therapeutic protein are considered therapeutically effective and correspond to complete correction of glycogen storage in muscles.

[0637] Therapeutic or pharmaceutical compositions comprising the compositions disclosed herein can be administered with suitable carriers, excipients, and other agents that are incorporated into formulations to provide improved transfer, delivery, tolerance, and the like. A multitude of appropriate formulations can be found in the formulary known to all pharmaceutical chemists: Remington's Pharmaceutical Sciences, Mack Publishing Company, Easton, PA. See also Powell et al. “Compendium of excipients for parenteral formulations” PDA (1998) J. Pharm. Sci. Technol. 52:238-311. In certain embodiments, the pharmaceutical compositions are non-pyrogenic.

[0638] The compositions disclosed herein may be administered to relieve or prevent or decrease the severity of one or more of the symptoms of GAA deficiency or Pompe disease. Such symptoms are described in more detail elsewhere herein.

[0639] The subject in any of the above methods can be one in need of amelioration or treatment of GAA deficiency or Pompe disease. The subject in any of the above methods can be from any suitable species, such as a eukaryote or a mammal. A mammal can be, for example, a non-human mammal, a human, a rodent, a rat, a mouse, or a hamster. Other non-human mammals include, for example, non-human primates, e.g., monkeys and apes. The term “non-human” excludes humans. Specific examples of suitable species include, but are not limited to, humans, rodents, mice, rats, and non-human primates. In a specific example, the subject is a human. The subject in some methods can be a neonatal subject. In other methods, the subject is not a neonatal subject.

[0640] In methods in which a nucleic acid encoding the multidomain therapeutic protein is genomically integrated, any target genomic locus capable of expressing a gene can be used, such as a safe harbor locus (safe harbor gene) or an endogenous GAA locus. Such loci are described in more detail elsewhere herein. In a specific example, the target genomic locus can be an endogenous ALB locus, such as an endogenous human ALB locus. For example, the nucleic acid encoding the multidomain therapeutic protein can be genomically integrated in intron 1 of the endogenous ALB locus. Endogenous ALB exon 1 can then splice into the coding sequence for the multidomain therapeutic protein in the nucleic acid construct.

[0641] Targeted insertion of the nucleic acid encoding the multidomain therapeutic protein into a target genomic locus, and particularly an endogenous ALB locus, offers multiple advantages. Such methods result in stable modification to allow for stable, long-term expression of the multidomain therapeutic protein coding sequence. With respect to the ALB locus, such methods are able to utilize the endogenous ALB promoter and regulatory regions to achieve therapeutically effective levels of expression. For example, the multidomain therapeutic protein coding sequence in the nucleic acid construct can comprise a promoterless gene, and the inserted nucleic acid can be operably linked to an endogenous promoter in the target genomic locus (e.g., ALB locus). Use of an endogenous promoter is advantageous because it obviates the need for inclusion of a promoter in the nucleic acid construct, allowing packaging of larger transgenes that may not normally package efficiently (e.g., in AAV). Alternatively, the multidomain therapeutic protein coding sequence in the nucleic acid construct can be operably linked to an exogenous promoter in the nucleic acid construct. Examples of types of promoters that can be used are disclosed elsewhere herein.

[0642] Optionally, some or all of the endogenous gene (e.g., endogenous ALB gene) at the target genomic locus can be expressed upon insertion of the nucleic acid encoding the multidomain therapeutic protein from the nucleic acid construct. Alternatively, in some methods, none of the endogenous gene at the target genomic locus is expressed. As one example, the modified target genomic locus (e.g., modified ALB locus) after integration of the nucleic acid encoding the multidomain therapeutic protein can encode a chimeric protein comprising an endogenous secretion signal (e.g., albumin secretion signal) and the multidomain therapeutic protein encoded by the nucleic acid construct. In another example, the first intron of an ALB locus can be targeted. The secretion signal peptide of ALB is encoded by exon 1 of the ALB gene. In such a scenario, a promoterless cassette bearing a splice acceptor and the multidomain therapeutic protein coding sequence will support expression and secretion of the multidomain therapeutic protein. Splicing between endogenous ALB exon 1 and the integrated multidomain therapeutic protein coding sequence creates a chimeric mRNA and protein including the endogenous ALB sequence encoded by exon 1 operably linked to the multidomain therapeutic protein sequence encoded by the integrated nucleic acid.

[0643] The nucleic acid encoding the multidomain therapeutic protein can be inserted into the target genomic locus by any means, including homologous recombination (HR) and non-homologous end joining (NHEJ) as described elsewhere herein. In a specific example, the nucleic acid encoding the multidomain therapeutic protein is inserted by NHEJ (e.g., does not comprise a homology arm and is inserted by NHEJ).

[0644] In another specific example, the nucleic acid encoding the multidomain therapeutic protein can be inserted via homology-independent targeted integration (e.g., directional homology-independent targeted integration). For example, the multidomain therapeutic protein coding sequence in the nucleic acid construct can be flanked on each side by a target site for a nuclease agent (e.g., the same target site as in the target genomic locus, and the same nuclease agent being used to cleave the target site in the target genomic locus). The nuclease agent can then cleave the target sites flanking the multidomain therapeutic protein coding sequence. In a specific example, the nucleic acid construct is delivered AAV-mediated delivery, and cleavage of the target sites flanking the multidomain therapeutic protein coding sequence can remove the inverted terminal repeats (ITRs) of the AAV. Removal of the ITRs can make it easier to assess successful targeting, because presence of the ITRs can hamper sequencing efforts due to the repeated sequences. In some methods, the target site in the target genomic locus (e.g., a gRNA target sequence including the flanking protospacer adjacent motif) is no longer present if the multidomain therapeutic protein coding sequence is inserted into the target genomic locus in the correct orientation but it is reformed if the multidomain therapeutic protein coding sequence is inserted into the target genomic locus in the opposite orientation. This can help ensure that the multidomain therapeutic protein coding sequence is inserted in the correct orientation for expression.

[0645] In any of the above methods, the multidomain therapeutic protein nucleic acid construct can be administered simultaneously with the nuclease agent (e.g., CRISPR/Cas system) or not simultaneously (e.g., sequentially in any combination). For example, in a method comprising administering a composition comprising the multidomain therapeutic protein nucleic acid construct and a nuclease agent, they can be administered separately. For example, the multidomain therapeutic protein nucleic acid construct can be administered prior to the nuclease agent, subsequent to the nuclease agent, or at the same time as the nuclease agent. Any suitable methods of administering nucleic acid constructs and nuclease agents to cells can be used, particularly methods of administering to the liver, and examples of such methods are described in more detail elsewhere herein. In methods of treatment or in methods of targeting a cell in vivo in a subject, the nucleic acid encoding the multidomain therapeutic protein can be inserted in particular types of cells in the subject. The method and vehicle for introducing the multidomain therapeutic protein nucleic acid construct and/or the nuclease agent into the subject can affect which types of cells in the subject are targeted. In some methods, for example, the nucleic acid encoding the multidomain therapeutic protein is inserted into a target genomic locus (e.g., an endogenous ALB locus) in liver cells, such as hepatocytes. Methods and vehicles for introducing such constructs and nuclease agents into the subject (including methods and vehicles that target the liver or hepatocytes, such as lipid nanoparticle-mediated delivery and AAV-mediated delivery (e.g., rAAV8-mediated delivery) and intravenous injection), are disclosed in more detail elsewhere herein.

[0646] In methods in which a composition comprising a nucleic acid construct (or vector or LNP) and a nuclease agent is administered (i.e., in methods in which a nucleic acid construct (or vector or LNP) and a nuclease agent are both administered), the nucleic acid construct and the nuclease agent can be administered simultaneously. Alternatively, the nucleic acid construct and the nuclease agent can be administered sequentially in any order. For example, the nucleic acid construct can be administered after the nuclease agent, or the nuclease agent can be administered after the nucleic acid construct. For example, the nuclease agent can be administered about 1 hour to about 48 hours, about 1 hour to about 24 hours, about 1 hour to about 12 hours, about 1 hour to about 6 hours, about 1 hour to about 2 hours, about 2 hours to about 48 hours, about 2 hours to about 24 hours, about 2 hours to about 12 hours, about 2 hours to about 6 hours, about 3 hours to about 48 hours, about 6 hours to about 48 hours, about 12 hours to about 48 hours, or about 24 hours to about 48 hours prior to or subsequent to administration of the nucleic acid construct.

[0647] In one example, the nucleic acid construct is administered about 4 hours, about 8 hours, about 12 hours, about 18 hours, about 1 day, about 2 days, about 3 days, about 4 days, about 5 days, about 6 days, or about 1 week prior to administering the nuclease agent. In another example, the nucleic acid construct is administered at least about 4 hours, at least about 8 hours, at least about 12 hours, at least about 18 hours, at least about 1 day, at least about 2 days, at least about 3 days, at least about 4 days, at least about 5 days, at least about 6 days, or at least about 1 week prior to administering the nuclease agent. In another example, the nucleic acid construct is administered about 4 hours to about 24 hours, about 4 hours to about 12 hours, about 4 hours to about 8 hours, about 8 hours to about 24 hours, about 12 hours to about 24 hours, about 1 day to about 7 days, about 1 day to about 6 days, about 1 day to about 5 days, about 1 day to about 4 days, about 1 day to about 3 days, about 1 day to about 2 days, about 2 days to about 7 days, about 3 days to about 7 days, about 4 days to about 7 days, about 5 days to about 7 days, about 6 days to about 7 days, or about 1 day to about 3 days prior to administering the nuclease agent.

[0648] In one example, the nucleic acid construct is administered about 4 hours, about 8 hours, about 12 hours, about 18 hours, about 1 day, about 2 days, about 3 days, about 4 days, about 5 days, about 6 days, or about 1 week after administering the nuclease agent. In another example, the nucleic acid construct is administered at least about 4 hours, at least about 8 hours, at least about 12 hours, at least about 18 hours, at least about 1 day, at least about 2 days, at least about 3 days, at least about 4 days, at least about 5 days, at least about 6 days, or at least about 1 week after administering the nuclease agent. In another example, the nucleic acid construct is administered about 4 hours to about 24 hours, about 4 hours to about 12 hours, about 4 hours to about 8 hours, about 8 hours to about 24 hours, about 12 hours to about 24 hours, about 1 day to about 7 days, about 1 day to about 6 days, about 1 day to about 5 days, about 1 day to about 4 days, about 1 day to about 3 days, about 1 day to about 2 days, about 2 days to about 7 days, about 3 days to about 7 days, about 4 days to about 7 days, about 5 days to about 7 days, about 6 days to about 7 days, or about 1 day to about 3 days after administering the nuclease agent.

[0649] In any of the above methods, the multidomain therapeutic protein nucleic acid construct and the nuclease agent (e.g., CRISPR/Cas system) can be administered using any suitable delivery system and known method. The nuclease agent components and multidomain therapeutic protein nucleic acid construct (e.g., the guide RNA, Cas protein, and multidomain therapeutic protein nucleic acid construct) can be delivered individually or together in any combination, using the same or different delivery methods as appropriate.

[0650] In methods in which a CRISPR/Cas system is used, a guide RNA can be introduced into or administered to a subject or cell, for example, in the form of an RNA (e.g., in vitro transcribed RNA, such as the modified guide RNAs disclosed herein) or in the form of a DNA encoding the guide RNA. When introduced in the form of a DNA, the DNA encoding a guide RNA can be operably linked to a promoter active in the cell or in a cell in the subject. For example, a guide RNA may be delivered via AAV and expressed in vivo under a U6 promoter. Such DNAs can be in one or more expression constructs. For example, such expression constructs can be components of a single nucleic acid molecule. Alternatively, they can be separated in any combination among two or more nucleic acid molecules (i.e., DNAs encoding one or more CRISPR RNAs and DNAs encoding one or more tracrRNAs can be components of a separate nucleic acid molecules).

[0651] Likewise, Cas proteins can be introduced into a subject or cell in any form. For example, a Cas protein can be provided in the form of a protein, such as a Cas protein complexed with a gRNA. Alternatively, a Cas protein can be provided in the form of a nucleic acid encoding the Cas protein, such as an RNA (e.g., messenger RNA (mRNA)), such as a modified mRNA as disclosed herein, or DNA). Optionally, the nucleic acid encoding the Cas protein can be codon optimized for efficient translation into protein in a particular cell or organism. For example, the nucleic acid encoding the Cas protein can be modified to substitute codons having a higher frequency of usage in a mammalian cell, a human cell, a rodent cell, a mouse cell, a rat cell, or any other host cell of interest, as compared to the naturally occurring polynucleotide sequence. When a nucleic acid encoding the Cas protein is introduced into a cell or a subject, the Cas protein can be transiently, conditionally, or constitutively expressed in the cell or in a cell in the subject.

[0652] In one example, the Cas protein is introduced in the form of an mRNA (e.g., a modified mRNA as disclosed herein), and the guide RNA is introduced in the form of RNA such as a modified gRNA as disclosed herein (e.g., together within the same lipid nanoparticle). Guide RNAs can be modified as disclosed elsewhere herein. Likewise, Cas mRNAs can be modified as disclosed elsewhere herein.

[0653] In methods in which a nucleic acid encoding the multidomain therapeutic protein is inserted following cleavage by a gene-editing system (e.g., a Cas protein), the gene-editing system (e.g., Cas protein) can cleave the target genomic locus to create a single-strand break (nick) or double-strand break, and the cleaved or nicked locus can be repaired by insertion of the nucleic acid encoding the multidomain therapeutic protein via non-homologous end joining (NHEJ)-mediated insertion or homology-directed repair. Optionally, repair with the multidomain therapeutic protein nucleic acid construct removes or disrupts the guide RNA target sequence(s) so that alleles that have been targeted cannot be re-targeted by the CRISPR/Cas reagents.

[0654] As explained in more detail elsewhere herein, the multidomain therapeutic protein nucleic acid constructs can comprise deoxyribonucleic acid (DNA) or ribonucleic acid (RNA), they can be single-stranded or double-stranded, and they can be in linear or circular form. The multidomain therapeutic protein nucleic acid constructs can be naked nucleic acids or can be delivered by viruses, such as AAV. In a specific example, the multidomain therapeutic protein nucleic acid construct can be delivered via AAV and can be capable of insertion into the target genomic locus (e.g., a safe harbor gene, an ALB gene, or intron 1 of an ALB gene) by non-homologous end joining (e.g., the multidomain therapeutic protein nucleic acid construct can be one that does not comprise a homology arm).

[0655] Some nucleic acids encoding the multidomain therapeutic protein are capable of insertion by non-homologous end joining. In some cases, such multidomain therapeutic protein nucleic acid constructs do not comprise a homology arm. For example, such nucleic acids encoding the multidomain therapeutic protein constructs can be inserted into a blunt end double-strand break following cleavage with a Cas protein. In a specific example, the multidomain therapeutic protein nucleic acid construct can be delivered via AAV and can be capable of insertion by non-homologous end joining (e.g., the multidomain therapeutic protein nucleic acid construct can be one that does not comprise a homology arm).

[0656] In another example, the nucleic acid encoding the multidomain therapeutic protein can be inserted via homology-independent targeted integration. For example, the multidomain therapeutic protein nucleic acid construct can be flanked on each side by a guide RNA target sequence (e.g., the same target site as in the target genomic locus, and the CRISPR/Cas reagent (Cas protein and guide RNA) being used to cleave the target site in the target genomic locus). The Cas protein can then cleave the target sites flanking the nucleic acid insert. In a specific example, the multidomain therapeutic protein nucleic acid construct is delivered AAV-mediated delivery, and cleavage of the target sites flanking the nucleic acid insert can remove the inverted terminal repeats (ITRs) of the AAV. In some methods, the target site in the target genomic locus (e.g., a guide RNA target sequence including the flanking protospacer adjacent motif) is no longer present if the nucleic acid insert is inserted into the target genomic locus in the correct orientation but it is reformed if the nucleic acid insert is inserted into the target genomic locus in the opposite orientation.

[0657] The methods disclosed herein can comprise introducing or administering into a subject (e.g., an animal or mammal, such as a human) or cell a multidomain therapeutic protein nucleic acid construct and optionally a nuclease agent such as CRISPR/Cas reagents, including in the form of nucleic acids (e.g., DNA or RNA), proteins, or nucleic-acid-protein complexes. “Introducing” or “administering” includes presenting to the cell or subject the molecule(s) (e.g., nucleic acid(s) or protein(s)) in such a manner that it gains access to the interior of the cell or to the interior of cells within the subject. The introducing can be accomplished by any means, and two or more of the components (e.g., two of the components, or all of the components) can be introduced into the cell or subject simultaneously or sequentially in any combination. For example, a Cas protein can be introduced into a cell or subject before introduction of a guide RNA, or it can be introduced following introduction of the guide RNA. As another example, a multidomain therapeutic protein nucleic acid construct can be introduced prior to the introduction of a Cas protein and a guide RNA, or it can be introduced following introduction of the Cas protein and the guide RNA (e.g., the multidomain therapeutic protein nucleic acid construct can be administered about 1, 2, 3, 4, 8, 12, 24, 36, 48, or 72 hours before or after introduction of the Cas protein and the guide RNA). See, e.g., US 2015/0240263 and US 2015/0110762, each of which is herein incorporated by reference in its entirety for all purposes. In addition, two or more of the components can be introduced into the cell or subject by the same delivery method or different delivery methods. Similarly, two or more of the components can be introduced into a subject by the same route of administration or different routes of administration.

[0658] A guide RNA can be introduced into a subject or cell, for example, in the form of an RNA (e.g., in vitro transcribed RNA) or in the form of a DNA encoding the guide RNA. Guide RNAs can be modified as disclosed elsewhere herein. When introduced in the form of a DNA, the DNA encoding a guide RNA can be operably linked to a promoter active in the cell or in a cell in the subject. For example, a guide RNA may be delivered via AAV and expressed in vivo under a U6 promoter. Such DNAs can be in one or more expression constructs. For example, such expression constructs can be components of a single nucleic acid molecule. Alternatively, they can be separated in any combination among two or more nucleic acid molecules (i.e., DNAs encoding one or more CRISPR RNAs and DNAs encoding one or more tracrRNAs can be components of a separate nucleic acid molecules).

[0659] Likewise, Cas proteins can be provided in any form. For example, a Cas protein can be provided in the form of a protein, such as a Cas protein complexed with a gRNA. Alternatively, a Cas protein can be provided in the form of a nucleic acid encoding the Cas protein, such as an RNA (e.g., messenger RNA (mRNA)) or DNA. Cas RNAs can be modified as disclosed elsewhere herein. Optionally, the nucleic acid encoding the Cas protein can be codon optimized for efficient translation into protein in a particular cell or organism. For example, the nucleic acid encoding the Cas protein can be modified to substitute codons having a higher frequency of usage in a mammalian cell, a human cell, a rodent cell, a mouse cell, a rat cell, or any other host cell of interest, as compared to the naturally occurring polynucleotide sequence. When a nucleic acid encoding the Cas protein is introduced into a cell or a subject, the Cas protein can be transiently, conditionally, or constitutively expressed in the cell or in a cell in the subject.

[0660] Nucleic acids encoding Cas proteins or guide RNAs can be operably linked to a promoter in an expression construct. Expression constructs include any nucleic acid constructs capable of directing expression of a gene or other nucleic acid sequence of interest (e.g., a Cas gene) and which can transfer such a nucleic acid sequence of interest to a target cell. For example, the nucleic acid encoding the Cas protein can be in a vector comprising a DNA encoding one or more gRNAs. Alternatively, it can be in a vector or plasmid that is separate from the vector comprising the DNA encoding one or more gRNAs. Suitable promoters that can be used in an expression construct include promoters active, for example, in one or more of a eukaryotic cell, a human cell, a non-human cell, a mammalian cell, a non-human mammalian cell, a rodent cell, a mouse cell, a rat cell, a hamster cell, a pluripotent cell, an embryonic stem (ES) cell, an adult stem cell, a developmentally restricted progenitor cell, an induced pluripotent stem (iPS) cell, or a one-cell stage embryo. For example, a suitable promoter can be active in a liver cell such as a hepatocyte. Such promoters can be, for example, conditional promoters, inducible promoters, constitutive promoters, or tissue-specific promoters. Optionally, the promoter can be a bidirectional promoter driving expression of both a Cas protein in one direction and a guide RNA in the other direction. Such bidirectional promoters can consist of (1) a complete, conventional, unidirectional Pol III promoter that contains 3 external control elements: a distal sequence element (DSE), a proximal sequence element (PSE), and a TATA box; and (2) a second basic Pol III promoter that includes a PSE and a TATA box fused to the 5′ terminus of the DSE in reverse orientation. For example, in the H1 promoter, the DSE is adjacent to the PSE and the TATA box, and the promoter can be rendered bidirectional by creating a hybrid promoter in which transcription in the reverse direction is controlled by appending a PSE and TATA box derived from the U6 promoter. See, e.g., US 2016/0074535, herein incorporated by references in its entirety for all purposes. Use of a bidirectional promoter to express genes encoding a Cas protein and a guide RNA simultaneously allows for the generation of compact expression cassettes to facilitate delivery. In preferred embodiments, promotors are accepted by regulatory authorities for use in humans. In certain embodiments, promotors drive expression in a liver cell.

[0661] Molecules (e.g., Cas proteins or guide RNAs or nucleic acids encoding) introduced into the subject or cell can be provided in compositions comprising a carrier increasing the stability of the introduced molecules (e.g., prolonging the period under given conditions of storage (e.g., −20° C., 4° C., or ambient temperature) for which degradation products remain below a threshold, such below 0.5% by weight of the starting nucleic acid or protein; or increasing the stability in vivo). Non-limiting examples of such carriers include poly(lactic acid) (PLA) microspheres, poly(D,L-lactic-coglycolic-acid) (PLGA) microspheres, liposomes, micelles, inverse micelles, lipid cochleates, and lipid microtubules.

[0662] Various methods and compositions are provided herein to allow for introduction of molecule (e.g., a nucleic acid or protein) into a cell or subject. Methods for introducing molecules into various cell types are known and include, for example, stable transfection methods, transient transfection methods, and virus-mediated methods.

[0663] Transfection protocols as well as protocols for introducing molecules into cells may vary. Non-limiting transfection methods include chemical-based transfection methods using liposomes; nanoparticles; calcium phosphate (Graham et al. (1973) Virology 52 (2): 456-67, Bacchetti et al. (1977) Proc. Natl. Acad. Sci. U.S.A. 74 (4):1590-4, and Kriegler, M (1991). Transfer and Expression: A Laboratory Manual. New York: W. H. Freeman and Company. pp. 96-97); dendrimers; or cationic polymers such as DEAE-dextran or polyethylenimine. Non-chemical methods include electroporation, sonoporation, and optical transfection. Particle-based transfection includes the use of a gene gun, or magnet-assisted transfection (Bertram (2006) Current Pharmaceutical Biotechnology 7, 277-28). Viral methods can also be used for transfection.

[0664] Introduction of nucleic acids or proteins into a cell can also be mediated by electroporation, by intracytoplasmic injection, by viral infection, by adenovirus, by adeno-associated virus, by lentivirus, by retrovirus, by transfection, by lipid-mediated transfection, or by nucleofection. Nucleofection is an improved electroporation technology that enables nucleic acid substrates to be delivered not only to the cytoplasm but also through the nuclear membrane and into the nucleus. In addition, use of nucleofection in the methods disclosed herein typically requires much fewer cells than regular electroporation (e.g., only about 2 million compared with 7 million by regular electroporation). In one example, nucleofection is performed using the LONZA® NUCLEOFECTOR™ system.

[0665] Introduction of molecules (e.g., nucleic acids or proteins) into a cell (e.g., a zygote) can also be accomplished by microinjection. In zygotes (i.e., one-cell stage embryos), microinjection can be into the maternal and/or paternal pronucleus or into the cytoplasm. If the microinjection is into only one pronucleus, the paternal pronucleus is preferable due to its larger size. Microinjection of an mRNA is preferably into the cytoplasm (e.g., to deliver mRNA directly to the translation machinery), while microinjection of a Cas protein or a polynucleotide encoding a Cas protein or encoding an RNA is preferable into the nucleus/pronucleus. Alternatively, microinjection can be carried out by injection into both the nucleus/pronucleus and the cytoplasm: a needle can first be introduced into the nucleus/pronucleus and a first amount can be injected, and while removing the needle from the one-cell stage embryo a second amount can be injected into the cytoplasm. If a Cas protein is injected into the cytoplasm, the Cas protein preferably comprises a nuclear localization signal to ensure delivery to the nucleus/pronucleus. Methods for carrying out microinjection are well known. See, e.g., Nagy et al. (Nagy A, Gertsenstein M, Vintersten K, Behringer R., 2003, Manipulating the Mouse Embryo. Cold Spring Harbor, New York: Cold Spring Harbor Laboratory Press); see also Meyer et al. (2010) Proc. Natl. Acad. Sci. U.S.A. 107:15022-15026 and Meyer et al. (2012) Proc. Natl. Acad. Sci. U.S.A. 109:9354-9359, each of which is herein incorporated by reference in its entirety for all purposes.

[0666] Other methods for introducing molecules (e.g., nucleic acid or proteins) into a cell or subject can include, for example, vector delivery, particle-mediated delivery, exosome-mediated delivery, lipid-nanoparticle-mediated delivery, cell-penetrating-peptide-mediated delivery, or implantable-device-mediated delivery. As specific examples, a nucleic acid or protein can be introduced into a cell or subject in a carrier such as a poly(lactic acid) (PLA) microsphere, a poly(D,L-lactic-coglycolic-acid) (PLGA) microsphere, a liposome, a micelle, an inverse micelle, a lipid cochleate, or a lipid microtubule. Some specific examples of delivery to a subject include hydrodynamic delivery, virus-mediated delivery (e.g., adeno-associated virus (AAV)-mediated delivery), and lipid-nanoparticle-mediated delivery.

[0667] Introduction of nucleic acids and proteins into cells or subjects can be accomplished by hydrodynamic delivery (HDD). For gene delivery to parenchymal cells, only essential DNA sequences need to be injected via a selected blood vessel, eliminating safety concerns associated with current viral and synthetic vectors. When injected into the bloodstream, DNA is capable of reaching cells in the different tissues accessible to the blood. Hydrodynamic delivery employs the force generated by the rapid injection of a large volume of solution into the incompressible blood in the circulation to overcome the physical barriers of endothelium and cell membranes that prevent large and membrane-impermeable compounds from entering parenchymal cells. In addition to the delivery of DNA, this method is useful for the efficient intracellular delivery of RNA, proteins, and other small compounds in vivo. See, e.g., Bonamassa et al. (2011) Pharm. Res. 28(4):694-701, herein incorporated by reference in its entirety for all purposes.

[0668] Introduction of nucleic acids can also be accomplished by virus-mediated delivery, such as AAV-mediated delivery or lentivirus-mediated delivery. Other exemplary viruses/viral vectors include retroviruses, adenoviruses, vaccinia viruses, poxviruses, and herpes simplex viruses. The viruses can infect dividing cells, non-dividing cells, or both dividing and non-dividing cells. The viruses can integrate into the host genome or alternatively do not integrate into the host genome. Such viruses can also be engineered to have reduced immunity. The viruses can be replication-competent or can be replication-defective (e.g., defective in one or more genes necessary for additional rounds of virion replication and/or packaging). Viruses can cause transient expression or longer-lasting expression. Viral vector may be genetically modified from their wild type counterparts. For example, the viral vector may comprise an insertion, deletion, or substitution of one or more nucleotides to facilitate cloning or such that one or more properties of the vector is changed. Such properties may include packaging capacity, transduction efficiency, immunogenicity, genome integration, replication, transcription, and translation. In some examples, a portion of the viral genome may be deleted such that the virus is capable of packaging exogenous sequences having a larger size. In some examples, the viral vector may have an enhanced transduction efficiency. In some examples, the immune response induced by the virus in a host may be reduced. In some examples, viral genes (such as integrase) that promote integration of the viral sequence into a host genome may be mutated such that the virus becomes non-integrating. In some examples, the viral vector may be replication defective. In some examples, the viral vector may comprise exogenous transcriptional or translational control sequences to drive expression of coding sequences on the vector. In some examples, the virus may be helper-dependent. For example, the virus may need one or more helper virus to supply viral components (such as viral proteins) required to amplify and package the vectors into viral particles. In such a case, one or more helper components, including one or more vectors encoding the viral components, may be introduced into a host cell or population of host cells along with the vector system described herein. In other examples, the virus may be helper-free. For example, the virus may be capable of amplifying and packaging the vectors without a helper virus. In some examples, the vector system described herein may also encode the viral components required for virus amplification and packaging.

[0669] Exemplary viral titers (e.g., AAV titers) include about 10¹² to about 10¹⁶ vg/mL. Other exemplary viral titers (e.g., AAV titers) include about 10¹² to about 10¹⁶ vg/kg of body weight.

[0670] Introduction of nucleic acids and proteins can also be accomplished by lipid nanoparticle (LNP)-mediated delivery. For example, LNP-mediated delivery can be used to deliver a combination of Cas mRNA and guide RNA or a combination of Cas protein and guide RNA. LNP-mediated delivery can be used to deliver a guide RNA in the form of RNA. In a specific example, the guide RNA and the Cas protein are each introduced in the form of RNA via LNP-mediated delivery in the same LNP. As discussed in more detail elsewhere herein, one or more of the RNAs can be modified. For example, guide RNAs can be modified to comprise one or more stabilizing end modifications at the 5′ end and/or the 3′ end. Such modifications can include, for example, one or more phosphorothioate linkages at the 5′ end and/or the 3′ end or one or more 2′-O-methyl modifications at the 5′ end and/or the 3′ end. As another example, Cas mRNA modifications can include substitution with pseudouridine (e.g., fully substituted with pseudouridine), 5′ caps, and polyadenylation. As another example, Cas mRNA modifications can include substitution with N1-methyl-pseudouridine (e.g., fully substituted with N1-methyl-pseudouridine), 5′ caps, and polyadenylation. Other modifications are also contemplated as disclosed elsewhere herein. Delivery through such methods can result in transient Cas expression and/or transient presence of the guide RNA, and the biodegradable lipids improve clearance, improve tolerability, and decrease immunogenicity. Lipid formulations can protect biological molecules from degradation while improving their cellular uptake. Lipid nanoparticles are particles comprising a plurality of lipid molecules physically associated with each other by intermolecular forces. These include microspheres (including unilamellar and multilamellar vesicles, e.g., liposomes), a dispersed phase in an emulsion, micelles, or an internal phase in a suspension. Such lipid nanoparticles can be used to encapsulate one or more nucleic acids or proteins for delivery. Formulations which contain cationic lipids are useful for delivering polyanions such as nucleic acids. Other lipids that can be included are neutral lipids (i.e., uncharged or zwitterionic lipids), anionic lipids, helper lipids that enhance transfection, and stealth lipids that increase the length of time for which nanoparticles can exist in vivo. Examples of suitable cationic lipids, neutral lipids, anionic lipids, helper lipids, and stealth lipids can be found in WO 2016/010840 A1 and WO 2017/173054 A1, each of which is herein incorporated by reference in its entirety for all purposes. An exemplary lipid nanoparticle can comprise a cationic lipid and one or more other components. In one example, the other component can comprise a helper lipid such as cholesterol. In another example, the other components can comprise a helper lipid such as cholesterol and a neutral lipid such as DSPC. In another example, the other components can comprise a helper lipid such as cholesterol, an optional neutral lipid such as DSPC, and a stealth lipid such as S010, 5024, 5027, 5031, or 5033.

[0671] The LNP may contain one or more or all of the following: (i) a lipid for encapsulation and for endosomal escape; (ii) a neutral lipid for stabilization; (iii) a helper lipid for stabilization; and (iv) a stealth lipid. See, e.g., Finn et al. (2018) Cell Rep. 22(9):2227-2235 and WO 2017/173054 A1, each of which is herein incorporated by reference in its entirety for all purposes. In certain LNPs, the cargo can include a guide RNA or a nucleic acid encoding a guide RNA. In certain LNPs, the cargo can include an mRNA encoding a Cas nuclease, such as Cas9, and a guide RNA or a nucleic acid encoding a guide RNA. In certain LNPs, the cargo can include a multidomain therapeutic protein nucleic acid construct. In certain LNPs, the cargo can include an mRNA encoding a Cas nuclease, such as Cas9, a guide RNA or a nucleic acid encoding a guide RNA, and a multidomain therapeutic protein nucleic acid construct. LNPs for use in the methods are described in more detail elsewhere herein.

[0672] The mode of delivery can be selected to decrease immunogenicity. For example, a Cas protein and a gRNA may be delivered by different modes (e.g., bi-modal delivery). These different modes may confer different pharmacodynamics or pharmacokinetic properties on the subject delivered molecule (e.g., Cas or nucleic acid encoding, gRNA or nucleic acid encoding, or multidomain therapeutic protein nucleic acid construct). For example, the different modes can result in different tissue distribution, different half-life, or different temporal distribution. Some modes of delivery (e.g., delivery of a nucleic acid vector that persists in a cell by autonomous replication or genomic integration) result in more persistent expression and presence of the molecule, whereas other modes of delivery are transient and less persistent (e.g., delivery of an RNA or a protein). Delivery of Cas proteins in a more transient manner, for example, as mRNA or protein, can ensure that the Cas/gRNA complex is only present and active for a short period of time and can reduce immunogenicity caused by peptides from the bacterially-derived Cas enzyme being displayed on the surface of the cell by MHC molecules. Such transient delivery can also reduce the possibility of off-target modifications.

[0673] Administration in vivo can be by any suitable route including, for example, systemic routes of administration such as parenteral administration, e.g., intravenous, subcutaneous, intra-arterial, or intramuscular. In a specific example, administration in vivo is intravenous.

[0674] Compositions comprising the guide RNAs and/or Cas proteins (or nucleic acids encoding the guide RNAs and/or Cas proteins) can be formulated using one or more physiologically and pharmaceutically acceptable carriers, diluents, excipients or auxiliaries. The formulation can depend on the route of administration chosen. Pharmaceutically acceptable means that the carrier, diluent, excipient, or auxiliary is compatible with the other ingredients of the formulation and not substantially deleterious to the recipient thereof. In a specific example, the route of administration and/or formulation or chosen for delivery to the liver (e.g., hepatocytes).

[0675] The methods disclosed herein can increase multidomain therapeutic protein or GAA protein levels and/or multidomain therapeutic protein or GAA activity levels in a cell or subject (e.g., circulating, serum, or plasma levels in a subject) and can comprise measuring multidomain therapeutic protein or GAA protein levels and/or multidomain therapeutic protein or GAA activity levels in a cell or subject (e.g., circulating, serum, or plasma levels in a subject). In one example, the methods result in increased expression of the multidomain therapeutic protein in the subject compared to a method comprising administering an episomal expression vector encoding the multidomain therapeutic protein or compared to a method in which a nucleic acid construct with a different polyadenylation signal is used. For example, the methods can result in increased serum levels of the multidomain therapeutic protein in the subject compared to a method comprising administering an episomal expression vector encoding the multidomain therapeutic protein or compared to a method in which a nucleic acid construct with a different polyadenylation signal is used. The methods can also result in increased multidomain therapeutic protein activity or GAA activity in the subject compared to a method comprising administering an episomal expression vector encoding the multidomain therapeutic protein or compared to a method in which a nucleic acid construct with a different polyadenylation signal is used. Levels of circulating multidomain therapeutic protein or GAA activity can be measured by using well-known methods.

[0676] In some methods, GAA activity and/or expression levels in a subject or in a target tissue (e.g., a target tissue in the central nervous system) are increased to about or at least about 2%, about or at least about 10%, about or at least about 25%, about or at least about 40%, about or at least about 50%, about or at least about 60%, about or at least about 70%, about or at least about 75%, about or at least about 80%, about or at least about 90%, or at least about 100%, or more, of normal level. In some methods, GAA activity and/or expression levels in a subject or in a target tissue (e.g., a target tissue in the central nervous system) are increased to about or at least about 40%, about or at least about 50%, about or at least about 60%, about or at least about 70%, about or at least about 75%, about or at least about 80%, about or at least about 90%, or at least about 100%, or more, of normal level. In certain embodiments, the level of expression or activity is measured in a cell or tissue in which a sign or symptom of the GAA loss of function is present. For example, when the loss of function results in muscle dysfunction, the level or activity of the multidomain therapeutic protein or GAA is measured in a muscle cell. It is understood that depending on the exogenous protein, the level of activity of the multidomain therapeutic protein may not compare 1:1 with a native GAA protein based on weight. In such embodiment, the relative activity of the multidomain therapeutic protein and the native GAA can be compared. In certain embodiments, the loss of function is nearly complete such that a relative activity cannot be determined. In certain embodiments, the comparison is made to an appropriate control subject. Selection of an appropriate control subject is within the ability of those of skill in the art. In certain embodiments, the level of expression is sufficient to treat at least one sign or symptom resulting from the loss of function of the GAA. GAA activity can be assessed by any known method. For example, to assess GAA activity (or deficiencies of activity), blood-based assays can measure GAA activity in dried blood spots or fresh blood. GAA activity can also be measured in fibroblasts from a skin biopsy or muscle biopsy. Other secondary measures can be measuring urine glucose tetrasaccharides by mass spectrometry.

[0677] In some methods, circulating multidomain therapeutic protein levels (i.e., serum levels) are about or at least about 0.5, about or at least about 1, about or at least about 2, about or at least about 3, about or at least about 4, about or at least about 5, about or at least about 6, about or at least about 7, about or at least about 8, about or at least about 9, or about or at least about 10 μg/mL. In some methods, multidomain therapeutic protein levels are at least about 1 μg/mL or about 1 μg/mL. In some methods, multidomain therapeutic protein levels are at least about 2 μg/mL or about 2 μg/mL. In some methods, multidomain therapeutic protein levels are at least about 3 μg/mL or about 3 μg/mL. In some methods, multidomain therapeutic protein levels are at least about 5 μg/mL or about 5 μg/mL. In some methods, multidomain therapeutic protein levels are about 1 μg/mL to about 30 μg/mL, about 2 μg/mL to about 30 μg/mL, about 3 μg/mL to about 30 μg/mL, about 4 μg/mL to about 30 μg/mL, about 5 μg/mL to about 30 μg/mL, about 1 μg/mL to about 20 μg/mL, about 2 μg/mL to about 20 μg/mL, about 3 μg/mL to about 20 μg/mL, about 4 μg/mL to about 20 μg/mL, about 5 μg/mL to about 20 μg/mL. For example, the method can result in multidomain therapeutic protein levels of about 2 μg/mL to about 30 μg/mL or 2 μg/mL to about 20 μg/mL. For example, the method can result in multidomain therapeutic protein levels of about 3 μg/mL to about 30 μg/mL or 3 μg/mL to about 20 μg/mL. For example, the method can result in multidomain therapeutic protein levels of about 5 μg/mL to about 30 μg/mL or 5 μg/mL to about 20 μg/mL. In some embodiments, the recited expression levels are at least 1 month after administration. In some embodiments, the recited expression levels are at least 2 months after administration. In some embodiments, the recited expression levels are at least 3 months after administration. In some embodiments, the recited expression levels are at least 4 months after administration. In some embodiments, the recited expression levels are at least 5 months after administration. In some embodiments, the recited expression levels are at least 6 months after administration. In some embodiments, the recited expression levels are at least 9 months after administration. In some embodiments, the recited expression levels are at least 12 months after administration.

[0678] In some methods, the method increases expression and/or activity of GAA or the multidomain therapeutic protein over the subject's baseline expression and/or activity (i.e., expression and/or activity prior to administration). In some methods, the method increases expression and/or activity of GAA over the subject's baseline expression and/or activity (i.e., expression and/or activity prior to administration. In some methods, GAA activity and/or GAA expression or serum levels in a subject are increased by about or at least about 10%, about or at least about 25%, about or at least about 50%, about or at least about 75%, or about or at least about 100%, or more, as compared to the subject's GAA expression or serum levels and/or activity (e.g., GAA activity) before administration (i.e., the subject's baseline levels). It is understood that depending on the multidomain therapeutic protein, the level of activity of the multidomain therapeutic protein may not compare 1:1 with a native protein based on weight. In such embodiment, the relative activity of the multidomain therapeutic protein and the native GAA can be compared. In certain embodiments, the loss of function is nearly complete such that a relative activity cannot be determined. In certain embodiments, the level of expression is sufficient to treat at least one sign or symptom resulting from the loss of function of the GAA.

[0679] In some methods, the method increases expression and/or activity of the multidomain therapeutic protein over the cell's baseline expression and/or activity (i.e., expression and/or activity prior to administration). In some methods, the method increases expression and/or activity of GAA over the cell's baseline expression and/or activity (i.e., expression and/or activity prior to administration. In some methods, GAA activity and/or expression levels in a cell or population of cells (e.g., liver cells, or hepatocytes) are increased by about or at least about 10%, about or at least about 25%, about or at least about 50%, about or at least about 75%, about or at least about 100%, or more, as compared to the GAA activity and/or expression levels before administration (i.e., the subject's baseline levels). It is understood that depending on the multidomain therapeutic protein, the level of activity of the multidomain therapeutic protein may not compare 1:1 with a native GAA protein based on weight. In such embodiment, the relative activity of the multidomain therapeutic protein and the native GAA protein can be compared. In certain embodiments, the GAA loss of function is nearly complete such that a relative activity cannot be determined. In certain embodiments, the level of expression is sufficient to treat at least one sign or symptom resulting from the loss of function of the GAA.

[0680] In a specific example, the GAA activity levels in a subject or in a target tissue (e.g., a target tissue in the central nervous system) are increased to no more than about 500%, no more than about 400%, no more than about 300%, no more than about 250%, no more than about 200%, or no more than about 150% of normal GAA activity levels.

[0681] In a specific example, the GAA activity levels in the subject or in a target tissue (e.g., a target tissue in the central nervous system) are increased to at least about 1%, at least about 5%, at least about 10%, at least about 15%, at least about 20%, at least about 25%, at least about 30%, at least about 35%, at least about 40%, at least about 45%, at least about 50%, at least about 55%, at least about 60%, at least about 65%, at least about 70%, at least about 75%, at least about 80%, at least about 85%, at least about 90%, or at least about 100% of normal GAA activity levels. In a specific example, the GAA activity levels in the subject or in a target tissue (e.g., a target tissue in the central nervous system) are increased to at least about 40%, at least about 45%, at least about 50%, at least about 55%, at least about 60%, at least about 65%, at least about 70%, at least about 75%, at least about 80%, at least about 85%, at least about 90%, or at least about 100% of normal GAA activity levels.

[0682] In a specific example, a subject has infantile-onset Pompe disease (e.g., classic infantile-onset Pompe disease), and the GAA activity levels in the subject are increased to at least about 1%, at least about 5%, at least about 10%, at least about 15%, at least about 20%, at least about 25%, at least about 30%, at least about 35%, at least about 40%, at least about 45%, at least about 50%, at least about 55%, at least about 60%, at least about 65%, at least about 70%, at least about 75%, at least about 80%, at least about 85%, at least about 90%, or at least about 100% of normal GAA activity levels. In a specific example, a subject has infantile-onset Pompe disease (e.g., classic infantile-onset Pompe disease), and the GAA activity levels in the subject are increased to at least about 40%, at least about 45%, at least about 50%, at least about 55%, at least about 60%, at least about 65%, at least about 70%, at least about 75%, at least about 80%, at least about 85%, at least about 90%, or at least about 100% of normal GAA activity levels.

[0683] In a specific example, a subject has infantile-onset Pompe disease (e.g., classic or non-classic infantile-onset Pompe disease), and the GAA activity levels in the subject are increased to at least about 2% at least about 5%, at least about 10%, at least about 15%, at least about 20%, at least about 25%, at least about 30%, at least about 35%, at least about 40%, at least about 45%, at least about 50%, at least about 55%, at least about 60%, at least about 65%, at least about 70%, at least about 75%, at least about 80%, at least about 85%, at least about 90%, or at least about 100% of normal GAA activity levels (e.g., at least about 10%, at least about 15%, at least about 20%, at least about 25%, at least about 30%, at least about 35%, at least about 40%, at least about 45%, at least about 50%, at least about 55%, at least about 60%, at least about 65%, at least about 70%, at least about 75%, at least about 80%, at least about 85%, at least about 90%, or at least about 100% of normal GAA activity levels). In a specific example, a subject has infantile-onset Pompe disease (e.g., classic or non-classic infantile-onset Pompe disease), and the GAA activity levels in the subject are increased to at least about 40%, at least about 45%, at least about 50%, at least about 55%, at least about 60%, at least about 65%, at least about 70%, at least about 75%, at least about 80%, at least about 85%, at least about 90%, or at least about 100% of normal GAA activity levels.

[0684] In a specific example, a subject has late-onset Pompe disease, and the GAA activity levels in the subject are increased to at least about 2% at least about 5%, at least about 10%, at least about 15%, at least about 20%, at least about 25%, at least about 30%, at least about 35%, at least about 40%, at least about 45%, at least about 50%, at least about 55%, at least about 60%, at least about 65%, at least about 70%, at least about 75%, at least about 80%, at least about 85%, at least about 90%, or at least about 100% of normal GAA activity levels (e.g., at least about 40%, at least about 45%, at least about 50%, at least about 55%, at least about 60%, at least about 65%, at least about 70%, at least about 75%, at least about 80%, at least about 85%, at least about 90%, or at least about 100% of normal GAA activity levels).

[0685] In a specific example, a subject has infantile-onset Pompe disease (e.g., classic infantile-onset Pompe disease), and the GAA activity levels in the subject are increased to more than about 1%, more than about 5%, more than about 10%, more than about 15%, more than about 20%, more than about 25%, more than about 30%, more than about 35%, more than about 40%, more than about 45%, more than about 50%, more than about 55%, more than about 60%, more than about 65%, more than about 70%, more than about 75%, more than about 80%, more than about 85%, more than about 90%, or more than about 100% of normal GAA activity levels. In a specific example, a subject has infantile-onset Pompe disease (e.g., classic infantile-onset Pompe disease), and the GAA activity levels in the subject are increased to more than about 40%, more than about 45%, more than about 50%, more than about 55%, more than about 60%, more than about 65%, more than about 70%, more than about 75%, more than about 80%, more than about 85%, more than about 90%, or more than about 100% of normal GAA activity levels

[0686] In a specific example, a subject has infantile-onset Pompe disease (e.g., classic or non-classic infantile-onset Pompe disease), and the GAA activity levels in the subject are increased to more than about 2% more than about 5%, more than about 10%, more than about 15%, more than about 20%, more than about 25%, more than about 30%, more than about 35%, more than about 40%, more than about 45%, more than about 50%, more than about 55%, more than about 60%, more than about 65%, more than about 70%, more than about 75%, more than about 80%, more than about 85%, more than about 90%, or more than about 100% of normal GAA activity levels (e.g., more than about 10%, more than about 15%, more than about 20%, more than about 25%, more than about 30%, more than about 35%, more than about 40%, more than about 45%, more than about 50%, more than about 55%, more than about 60%, more than about 65%, more than about 70%, more than about 75%, more than about 80%, more than about 85%, more than about 90%, or more than about 100% of normal GAA activity levels). In a specific example, a subject has infantile-onset Pompe disease (e.g., classic or non-classic infantile-onset Pompe disease), and the GAA activity levels in the subject are increased to more than about 40%, more than about 45%, more than about 50%, more than about 55%, more than about 60%, more than about 65%, more than about 70%, more than about 75%, more than about 80%, more than about 85%, more than about 90%, or more than about 100% of normal GAA activity levels.

[0687] In a specific example, a subject has late-onset Pompe disease, and the GAA activity levels in the subject are increased to more than about 2% more than about 5%, more than about 10%, more than about 15%, more than about 20%, more than about 25%, more than about 30%, more than about 35%, more than about 40%, more than about 45%, more than about 50%, more than about 55%, more than about 60%, more than about 65%, more than about 70%, more than about 75%, more than about 80%, more than about 85%, more than about 90%, or more than about 100% of normal GAA activity levels (e.g., more than about 40%, more than about 45%, more than about 50%, more than about 55%, more than about 60%, more than about 65%, more than about 70%, more than about 75%, more than about 80%, more than about 85%, more than about 90%, or more than about 100% of normal GAA activity levels).

[0688] In some methods, the method results in increased expression of the multidomain therapeutic protein in the subject (e.g., neonatal subject) compared to a method comprising administering an episomal expression vector encoding the multidomain therapeutic protein in a control subject or compared to a method in which a nucleic acid construct with a different polyadenylation signal is used. In some methods, the method results in increased serum levels of the multidomain therapeutic protein in the subject (e.g., neonatal subject) compared to a method comprising administering an episomal expression vector encoding the multidomain therapeutic protein to a control subject or compared to a method in which a nucleic acid construct with a different polyadenylation signal is used.

[0689] In some methods, the method increases expression or activity of the multidomain therapeutic protein or GAA over the subject's (e.g., neonatal subject's) baseline expression or activity of the multidomain therapeutic protein or GAA (i.e., any percent change in expression that is larger than typical error bars). In some methods, the method results in expression of the multidomain therapeutic protein or GAA at a detectable level above zero, e.g., at a statistically significant level, a clinically relevant level.

[0690] Some methods comprise achieving a durable or sustained effect in a human, such as an at least at least 8 weeks, at least 24 weeks, for example, at least 1 year, or optionally at least 2 year effect, and in some embodiments, at least 3 year, at least 4 year, or at least 5 year effect. Some methods comprise achieving the therapeutic effect in a human in a durable and sustained manner, such as an at least 8 weeks, at least 24 weeks, for example, at least 1 year, or optionally at least 2 year effect, and in some embodiments, at least 3 year, at least 4 year, or at least 5 year effect. In some methods, the increased multidomain therapeutic protein or GAA activity and/or expression level in a human is stable for at least at least 8 weeks, at least 24 weeks, for example, at least 1 year, optionally at least 2 years, and in some embodiments, at least 3 years, at least 4 years, or at least 5 years. In some methods, a steady-state activity and/or level of multidomain therapeutic protein or GAA in a human is achieved by at least 7 days, at least 14 days, or at least 28 days, optionally at least 56 days, at least 80 days, or at least 96 days. In additional methods, the method comprises maintaining multidomain therapeutic protein or GAA activity and/or levels after a single dose in a human for at least 8 weeks, at least 16 weeks, or at least 24 week, or in some embodiments at least 1 year, or at least 2 years, optionally at least 3 years, at least 4 years, or at least 5 years. For example, expression of the multidomain therapeutic protein or GAA can be sustained in the human subject for at least about 8 weeks, at least about 12 weeks, at least about 24 weeks, in certain embodiments, at least about 1 year, or at least about 2 years after treatment, and in some embodiments, at least 3 years, at least 4 years, or at least 5 years after treatment. Likewise, activity of the multidomain therapeutic protein or GAA can be sustained in the human subject for at least about 8 weeks, at least about 12 weeks, at least about 24 weeks, in certain embodiments for at least about 1 year, or at least about 2 years after treatment, and in some embodiments, at least 3 years, at least 4 years, or at least 5 years after treatment. In some methods, expression or activity of the multidomain therapeutic protein or GAA is maintained at a level higher than the expression or activity of the multidomain therapeutic protein or GAA prior to treatment (i.e., the subject's baseline). In some methods, expression or activity of the multidomain therapeutic protein or GAA is considered sustained if it is maintained at a therapeutically effective level of expression or activity. Relative durations, in other organisms, are understood based, e.g., on life span and developmental stages, are covered within the disclosure above. In some methods, expression or activity of the multidomain therapeutic protein or GAA is considered “sustained” if the expression or activity in a human at six months after administration, one year after administration, or two years after administration, the expression or activity is at least 50% of the expression or activity of the peak level of expression or activity measured for that subject. In certain embodiments, at six months, e.g., at 24 weeks to 28 weeks, after administration the expression or activity is at least 50%, 55%, 60%, 65%, 70%, 75% or 80% of the expression or activity of the peak level of expression or activity measured for that subject. In certain embodiments, at one year, i.e., about 12 months, e.g., at 11-13 months, after administration the expression or activity is at least 50%, 55%, 60%, 65%, 70%, 75% or 80% of the expression or activity of the peak level of expression or activity measured for that subject. In certain embodiments, at two years, i.e., about 24 months, e.g., at 23-25 months, after administration the expression or activity is at least 50%, 55%, 60%, 65%, 70%, 75% or 80% of the expression or activity of the peak level of expression or activity measured for that subject. In certain embodiments, at six months after administration the expression or activity is at least 50%, preferably at least 60% of the expression or activity of the peak level of expression or activity measured for that subject. In certain embodiments, at one year after administration the expression or activity is at least 50%, preferably at least 60% of the expression or activity of the peak level of expression or activity measured for that subject. In certain embodiments, at two years after administration the expression or activity is at least 50%, preferably at least 60% of the expression or activity of the peak level of expression or activity measured for that subject. In preferred embodiments, the subject has routine monitoring of expression or activity levels of the polypeptide, e.g., weekly, monthly, particularly early after administration, e.g., within the first six months. Periodic measurements may establish that the effect on expression or activity is sustained at, e.g., 6 months after administration, one year after administration, or two years after administration. In some methods in neonatal subjects, the expression of the multidomain therapeutic protein or GAA is sustained when the neonatal subject becomes an adult. In some methods, the expression of the multidomain therapeutic protein or GAA is sustained for the lifetime of the subject or neonatal subject.

[0691] In some methods, the expression or activity of the multidomain therapeutic protein is at least 50% of the expression or activity of the multidomain therapeutic protein at a peak level of expression measured for the subject at 24 weeks after the administering. In some methods, the expression or activity of the multidomain therapeutic protein is at least 50% of the expression or activity of the multidomain therapeutic protein at a peak level of expression measured for the subject at one year after the administering. In some methods, the expression or activity of the multidomain therapeutic protein is at least 60% of the expression or activity of the multidomain therapeutic protein at a peak level of expression measured for the subject at 24 weeks after the administering. In some methods, the expression or activity of the multidomain therapeutic protein is at least 50% of the expression or activity of the multidomain therapeutic protein at a peak level of expression measured for the subject at two years after the administering. In some methods, the expression or activity of the multidomain therapeutic protein is at least 60% of the expression or activity of the multidomain therapeutic protein at a peak level of expression measured for the subject at 2 years after the administering. In some methods, the expression or activity of the multidomain therapeutic protein is at least 60% of the expression or activity of the multidomain therapeutic protein at a peak level of expression measured for the subject at 24 weeks after the administering.

[0692] In some methods involving insertion into an ALB locus, the subject's circulating albumin levels or cell's albumin levels are normal. Such methods may comprise maintaining the subject's circulating albumin levels or the cell's albumin levels within +5%, +10%, +15%, ±20%, or ±50% of normal circulating albumin levels or normal albumin levels. In some methods, the subject's or cell's albumin levels are unchanged as compared to the albumin levels of untreated individuals by at least week 4, at least week 8, at least week 12, or at least week 20. In some methods, the subject's or cell's albumin levels transiently drop and then return to normal levels. In particular, the methods may comprise detecting no significant alterations in levels of plasma albumin.

[0693] In some methods, the method further comprises assessing preexisting anti-GAA immunity in a subject prior to administering any of the nucleic acid constructs described herein. For example, such methods could comprise assessing immunogenicity using a total antibody (TAb) immune assay or a neutralizing antibody (NAb) assay. In some methods, the subject has not previously been administered recombinant GAA protein.

[0694] In some methods, the method further comprises assessing preexisting anti-AAV (e.g., anti-AAV8) immunity in a subject prior to administering any of the nucleic acid constructs described herein. For example, such methods could comprise assessing immunogenicity using a total antibody (TAb) immune assay or a neutralizing antibody (NAb) assay. See, e.g., Manno et al. (2006) Nat. Med. 12(3):342-347, Kruzik et al. (2019) Mol. Ther. Methods Clin. Dev. 14:126-133, and Weber (2021) Front. Immunol. 12:658399, each of which is herein incorporated by reference in its entirety for all purposes. In some embodiments, TAb assays look for antibodies that bind to the AAV vector, whereas NAb assays assess whether the antibodies that are present stop the AAV vector from transducing target cells. With TAb assays, the drug product or an empty capsid can be used to capture the antibodies; NAb assays can require a reporter vector (e.g., a version of the AAV vector encoding luciferase).

[0695] All patent filings, websites, other publications, accession numbers and the like cited above or below are incorporated by reference in their entirety for all purposes to the same extent as if each individual item were specifically and individually indicated to be so incorporated by reference. If different versions of a sequence are associated with an accession number at different times, the version associated with the accession number at the effective filing date of this application is meant. The effective filing date means the earlier of the actual filing date or filing date of a priority application referring to the accession number if applicable. Likewise, if different versions of a publication, website or the like are published at different times, the version most recently published at the effective filing date of the application is meant unless otherwise indicated. Any feature, step, element, embodiment, or aspect of the invention can be used in combination with any other unless specifically indicated otherwise. Although the present invention has been described in some detail by way of illustration and example for purposes of clarity and understanting, it will be apparent that certain changes and modifications may be practiced within the scope of the appended claims.

### BRIEF DESCRIPTION OF THE SEQUENCES

[0696] The nucleotide and amino acid sequences listed in the accompanying sequence listing are shown using standard letter abbreviations for nucleotide bases, and three-letter code for amino acids. The nucleotide sequences follow the standard convention of beginning at the 5′ end of the sequence and proceeding forward (i.e., from left to right in each line) to the 3′ end. Only one strand of each nucleotide sequence is shown, but the complementary strand is understood to be included by any reference to the displayed strand. When a nucleotide sequence encoding an amino acid sequence is provided, it is understood that codon degenerate variants thereof that encode the same amino acid sequence are also provided. The amino acid sequences follow the standard convention of beginning at the amino terminus of the sequence and proceeding forward (i.e., from left to right in each line) to the carboxy terminus.

TABLE 11
Description of Sequences.

| SEQ ID | | |
|---|---|---|
| NO | Type | Description |
| 1 | RNA | Cas9 mRNA |
| 2 | RNA | Cas9 mRNA CDS |
| 3 | DNA | Cas9 CDS |
| 4 | DNA | Human ALB Intron 1 |
| 5 | DNA | Guide RNA Target Sequence Plus PAM v1 |
| 6 | DNA | Guide RNA Target Sequence Plus PAM v2 |
| 7 | DNA | Guide RNA Target Sequence Plus PAM v3 |
| 8 | Protein | SpCas9 Protein V1 |
| 9 | DNA | SpCas9 DNA V1 |
| 10 | DNA | SpCas9 mRNA (cDNA) |
| 11 | Protein | SpCas9 Protein V2 |
| 12 | RNA | SpCas9 mRNA V2 |
| 13 | Protein | SV40 NLS v1 |
| 14 | Protein | SV40 NLS v2 |
| 15 | Protein | Nucleoplasmin NLS |
| 16 | RNA | crRNA Tail v1 |
| 17 | RNA | crRNA Tail v2 |
| 18 | RNA | TracrRNA v1 |
| 19 | RNA | TracrRNA v2 |
| 20 | RNA | TracrRNA v3 |
| 21 | RNA | gRNA Scaffold v1 |
| 22 | RNA | gRNA Scaffold v2 |
| 23 | RNA | gRNA Scaffold v3 |
| 24 | RNA | gRNA Scaffold v4 |
| 25 | RNA | gRNA Scaffold v5 |
| 26 | RNA | gRNA Scaffold v6 |
| 27 | RNA | gRNA Scaffold v7 |
| 28 | RNA | gRNA Scaffold v8 |
| 29 | RNA | Modified gRNA Scaffold |
| 30-61 | RNA | Human ALB Intron 1 Guide Sequences |
| 62-125 | RNA | Human ALB Intron 1 sgRNA Sequences |
| 126-157 | DNA | Human ALB Intron 1 Guide RNA Target Sequences |
| 158 | DNA | ITR 145 |
| 159 | DNA | ITR 141 |
| 160 | DNA | ITR 130 |
| 161 | DNA | SV40 polyA |
| 162 | DNA | bGH polyA |
| 163 | DNA | Mouse Alb exon 2 Splice Acceptor |
| 164 | RNA | Mouse Alb Intron 1 Guide Sequence g666 |
| 165 | DNA | Mouse Alb Intron 1 Guide RNA Target Sequence g666 |
| 166-167 | RNA | Mouse Alb Intron 1 sgRNA Sequences g666 |
| 168 | DNA | ITR 145 Reverse Complement |
| 169 | DNA | SV40 polyA v2 |
| 170-491 | DNA & Protein | Domains in Anti-hTfR Antibodies, Antigen-Binding Fragments or scFv Molecules |
| 492-523 | Protein | Anti-hTfR scFvs |
| 524 | DNA | 12799 GA 0 anti-TfR scFv |
| 525 | DNA | 12799 GS 0 anti-TfR scFv |
| 526 | DNA | 12799 GS Ov2 anti-TfR scFv |
| 527 | DNA | 12843 GA 0 anti-TfR scFv |
| 528 | DNA | 12843 GS 0 anti-TfR scFv |
| 529 | DNA | 12843 GS Ov2 anti-TfR scFv |
| 530 | DNA | 12847 GA 0 anti-TfR scFv |
| 531 | DNA | 12847 GS 0 anti-TfR scFv |
| 532 | DNA | 12847 GS Ov2 anti-TfR scFv |
| 533 | DNA | 12799 anti-TfR scFv |
| 534 | DNA | 12839 anti-TfR scFv |
| 535 | DNA | 12843 anti-TfR scFv |
| 536 | DNA | 12847 anti-TfR scFv |
| 537 | Protein | Linker |
| 538 | Protein | Kappa Constant Light Domain |
| 539 | Protein | IgG1 CH1 Heavy Domain |
| 540-609 | Protein | Fab Heavy and Light Chains |
| 610 | Protein | Mus musculus Ror1 Signal Peptide |
| 611 | Protein | IgG4 CH1 Heavy Domain |
| 612 | Protein | Optional N-Terminal Sequence |
| 613 | DNA | ITR 141 Reverse Complement |
| 614 | DNA | ITR 130 Reverse Complement |
| 615 | DNA | SV40 polyA V3 |
| 616 | Protein | 3X G4S Linker |
| 617 | Protein | 2X G4S Linker |
| 618-622 | DNA | 3X G4S Linker Coding Sequences |
| 623-629 | DNA | 2X G4S Linker Coding Sequences |
| 630 | DNA | 1X G4S Linker Coding Sequence |
| 631-638 | Protein | Additional Anti-hTfR Antibody Sequences |
| 639-641 | Protein | Sequences from Examples |
| 642-643 | DNA | Sequences from Examples |
| 644-647 | Protein | Sequences from Examples |
| 648-679 | DNA | Sequences from Examples |
| 680-703 | Protein | Additional Anti-hTfR Antibody Sequences |
| 704-723 | Protein | TfR Epitopes |
| 724 | Protein | Human GAA Protein (NP_000143.2) |
| 725 | DNA | Human GAA cDNA/mRNA (NM_000152.5) |
| 726 | DNA | Human GAA CDS (CCDS32760.1) |
| 727 | Protein | Human GAA (70-952) Protein |
| 728 | DNA | Human GAA (70-952) CDS |
| 729 | DNA | Human GAA (70-952) CDS - GA-0 |
| 730 | Protein | 12450 anti-CD63 scFv |
| 731 | DNA | 12450 anti-CD63 scFv CDS |
| 732 | DNA | 12450 anti-CD63 scFv CDS - GA-0 |
| 733 | Protein | 12450 anti-CD63 scFv:GAA (70-952) Fusion Protein |
| 734 | DNA | 12450 anti-CD63 scFv:GAA (70-952) Fusion Protein CDS |
| 735 | DNA | 12450 anti-CD63 scFv:GAA (70-952) Fusion Protein CDS - DC-0 |
| 736 | DNA | 12450 anti-CD63 scFv:GAA (70-952) Fusion Protein CDS - GA-0 |
| 737 | DNA | 12450 anti-CD63 scFv:GAA (70-952) Fusion Protein CDS - GS-0 |
| 738 | DNA | 12450 anti-CD63 scFv:GAA (70-952) Fusion Protein CDS - GS-0v2 |
| 739 | DNA | 12450 anti-CD63 scFv:GAA (70-952) Fusion Protein CDS - GS-1 |
| 740 | DNA | 12450 anti-CD63 scFv:GAA (70-952) Fusion Protein CDS - GS-44 |
| 741 | DNA | 12450 anti-CD63 scFv:GAA (70-952) Fusion Protein CDS - GS-50 |
| 742 | DNA | 12450 anti-CD63 scFv:GAA (70-952) Fusion Protein CDS - RE-8 |
| 743 | DNA | Glycine-Encoding Sequence v1 |
| 744 | DNA | Glycine-Encoding Sequence v2 |
| 745 | DNA | 2xFix 12847 anti-TfR:GAA Coding Sequence |
| 746 | Protein | 12847 anti-TfR:GAA Fusion Protein |
| 747 | DNA | 3xG4S Linker Coding Sequence |
| 748 | DNA | 1xG4S Linker Coding Sequence |
| 749 | DNA | GAA (70-952) Coding Sequence [3078_GT_>_GG] |
| 750 | DNA | GAA (70-952) Coding Sequence [1830_GGTGGT_>_GGGGGC] |
| | | [3078_GT_>_GG] |
| 751 | DNA | bGH polyA v2 |
| 752 | DNA | SV40_late_polyA w/Reverse Strand AAUAAAs Mutated to AAUCAAs |
| 753 | DNA | Synthetic polyA (SPA) |
| 754 | DNA | Stuffer Sequence |
| 755 | DNA | MAZ Element |
| 756 | DNA | 6xFix anti-CD63:GAA Coding Sequence |
| 757 | DNA | 4xFix anti-CD63:GAA Coding Sequence [274_G > T] 723_T > G |
| | | 1830_GGT_GGT_>_GGG_GGC 3078_GT > GG] |
| 758 | DNA | 1xFix anti-CD63:GAA Coding Sequence [3078_GT > GG] |
| 759 | DNA | 6xFix anti-CD63 scFv Coding Sequence |
| 760 | DNA | 4xFix anti-CD63 scFv Coding Sequence |
| 761 | Protein | Anti-CD63 scFv VH |
| 762 | Protein | Anti-CD63 scFv VK |
| 763 | DNA | VVT874/VVT1251 - TfR Original Template pMID27199 ITR to ITR |
| 764 | DNA | VVT1125/VVT1261 - pAAV-12847GAA(GS0v2)-2Xfix-bGH.sv40LuniPA |
| 765 | DNA | VVT1129/VVT1262 - pAAV-12847GAA(GS0v2)-2Xfix-bGHpA |
| 766 | DNA | VVT1126 - pAAV-12847GAA(GS0v2)-bGHpA swap |
| 767 | DNA | VVT1254/VVT1252 - CD63 Original Template pMID27863 ITR to ITR |
| 768 | DNA | VVT1121 - pAAV-CD63GAA-4Xfix-bGH.sv40LuniPA |
| 769 | DNA | VVT1122 - pAAV-CD63GAA-4Xfix-bGHpA |
| 770 | DNA | VVT1123 - pAAV-CD63GAA-3078fix-bGH.sv40LuniPA (1 CpG) |
| 771 | DNA | VVT1118 - pAAV-CD63GAA-3078fix-bGHpA |
| 772 | DNA | VVT1124 - pAAV-CD63GAA-bGHpA swap |
| 773 | DNA | VVT1119 - pAAV-CD63GAA-bGHpA.SPA swap |
| 774 | DNA | VVT1120 - pAAV-CD63GAA-bGHpA.stuffer.SPA |
| 775 | DNA | VVT1138 - pAAV-CD63GAA-bGHpA-MAZ |
| 776 | DNA | VVT1127 - pAAV-CD63GAA-SV40E-MAZ |
| 777 | DNA | VVT1128/VVT1263 - pAAV-CD63GAA-6Xfix-bGH.sv40LuniPA |
| 778 | DNA | VVT1139/VVT1264 - pAAV-CD63GAA-6Xfix-bGHpA |
| 779 | DNA | VVT874/VVT1251 - TfR Original Template pMID27199 - no ITRs |
| 780 | DNA | VVT1125VVT/1261 - pAAV-12847GAA(GS0v2)-2Xfix-bGH.sv40LuniPA - no |
| | | ITRs |
| 781 | DNA | VVT1129/VVT1262 - pAAV-12847GAA(GS0v2)-2Xfix-bGHpA - no ITRs |
| 782 | DNA | VVT1126 - pAAV-12847GAA(GS0v2)-bGHpA swap - no ITRs |
| 783 | DNA | VVT1254/VVT1252 - CD63 Original Template pMID27863 - no ITRs |
| 784 | DNA | VVT1121 - pAAV-CD63GAA-4Xfix-bGH.sv40LuniPA - no ITRs |
| 785 | DNA | VVT1122 - pAAV-CD63GAA-4Xfix-bGHpA - no ITRs |
| 786 | DNA | VVT1123 - pAAV-CD63GAA-3078fix-bGH.sv40LuniPA (1 CpG) - no ITRs |
| 787 | DNA | VVT1118 - pAAV-CD63GAA-3078fix-bGHpA - no ITRs |
| 788 | DNA | VVT1124 - pAAV-CD63GAA-bGHpA swap - no ITRs |
| 789 | DNA | VVT1119 - pAAV-CD63GAA-bGHpA.SPA swap - no ITRs |
| 790 | DNA | VVT1120 - pAAV-CD63GAA-bGHpA.stuffer.SPA - no ITRs |
| 791 | DNA | VVT1138 - pAAV-CD63GAA-bGHpA-MAZ - no ITRs |
| 792 | DNA | VVT1127 - pAAV-CD63GAA-SV40E-MAZ - no ITRs |
| 793 | DNA | VVT1128/VVT1263 - pAAV-CD63GAA-6Xfix-bGH.sv40LuniPA - no ITRs |
| 794 | DNA | VVT1139/VVT1264 - pAAV-CD63GAA-6Xfix-bGHpA - no ITRs |
| 795 | DNA | Combined BGH and Unidirectional SV40 Late Polyadenylation Signal |
| 796-806 | Protein | TfR Epitopes |
| 807 | Protein | Heavy Chain Constant Domain |
| 808-839 | Protein | HC Full hlgG1 Sequences |
| 840 | Protein | IgG1 Heavy Chain Constant Domain |
| 841 | DNA | 2XH4 Linker CDS |
| 842 | Protein | 2XH4 Linker |

### EXAMPLES

### Example 1. Development of System for Insertion into Albumin Locus in Liver

[0697] A system for nuclease-mediated insertion (e.g., CRISPR/Cas) of a transgene into a specific locus (e.g., albumin intron 1) was developed to produce durable expression of the transgene, including when administered to neonates. Exemplary components of the system, including those used in subsequent examples, are described in more detail below.

### Single Guide RNA Design and Selection

[0698] The ALB locus was selected as the insertion site for the DNA templates. A list of single guide RNAs (sgRNAs) was generated that target human ALB intron 1. See Table 12. Cantidate sgRNAs were synthesized and formulated into lipid nanoparticles (LNPs) with Cas9 mRNA for evaluation in vitro and in vivo.

TABLE 12
Human ALB Intron 1 Guide RNAs.

| | SEQ ID | SEQ ID | SEQ ID | SEQ ID |
|---|---|---|---|---|
| | NO (DNA- | NO (Un- | NO | NO (Guide |
| Guide | Targeting | modified | (Modified | RNA Target |
| RNA | Segment) | sgRNA) | sgRNA) | Sequence) |
| G009844 | 30 | 62 | 94 | 126 |
| G009851 | 31 | 63 | 95 | 127 |
| G009852 | 32 | 64 | 96 | 128 |
| G009857 | 33 | 65 | 97 | 129 |
| G009858 | 34 | 66 | 98 | 130 |
| G009859 | 35 | 67 | 99 | 131 |
| G009860 | 36 | 68 | 100 | 132 |
| G009861 | 37 | 69 | 101 | 133 |
| G009866 | 38 | 70 | 102 | 134 |
| G009867 | 39 | 71 | 103 | 135 |
| G009868 | 40 | 72 | 104 | 136 |
| G009874 | 41 | 73 | 105 | 137 |
| G012747 | 42 | 74 | 106 | 138 |
| G012748 | 43 | 75 | 107 | 139 |
| G012749 | 44 | 76 | 108 | 140 |
| G012750 | 45 | 77 | 109 | 141 |
| G012751 | 46 | 78 | 110 | 142 |
| G012752 | 47 | 79 | 111 | 143 |
| G012753 | 48 | 80 | 112 | 144 |
| G012754 | 49 | 81 | 113 | 145 |
| G012755 | 50 | 82 | 114 | 146 |
| G012756 | 51 | 83 | 115 | 147 |
| G012757 | 52 | 84 | 116 | 148 |
| G012758 | 53 | 85 | 117 | 149 |
| G012759 | 54 | 86 | 118 | 150 |
| G012760 | 55 | 87 | 119 | 151 |
| G012761 | 56 | 88 | 120 | 152 |
| G012762 | 57 | 89 | 121 | 153 |
| G012763 | 58 | 90 | 122 | 154 |
| G012764 | 59 | 91 | 123 | 155 |
| G012765 | 60 | 92 | 124 | 156 |
| G012766 | 61 | 93 | 125 | 157 |

[0699] LNPs were first screened in primary human hepatocytes (PHH) using a bidirectional nanoluc-encoding AAV insertion template as a reporter. LNPs that supported targeted insertion of nanoluc were identified by measuring nanoluc protein secreted into the supernatant of PHH cultures. Cantidates that passed initial PHH screening were then tested for their ability to support in vivo gene insertion. Top cantidates from in vivo studies were functionally evaluated for off-target cutting.

[0700] LNP-g9860, which is formulated with ALB-targeting sgRNA 9860, described in more detail below, was selected based on supporting robust transgene expression levels across multiple platforms (primary human and non-human primate hepatocytes, ALB humanized mice, and non-human primates), lack of confirmed off-target sites, translation across species, lack of common human SNPs in the target site, low variability of transgene expression within groups, and performance across a dose range. The target site of sgRNA 9860 is conserved in cynomolgus monkeys. LNP-g9860 had no detectable off-target sites in the human genome (targeted amplicon sequencing performed in two lots of primary human hepatocytes at saturating levels of editing failed to validate any locus other than on-target at ALB) and supported transgene expression via insertion in primary human and non-human primate hepatocytes, ALB humanized mice, and non-human primates.

### LNP-g9860

[0701] LNP-g9860 was developed for use in targeting human ALB intron 1. LNP-g9860 is a lipid nanoparticle that includes a sgRNA of 100 nucleotides in length (g9860) and Cas9-encoding mRNA, each of which is described further below, encapsulated in an LNP comprised of four different lipids. The Cas9 protein, expressed from the Cas9 mRNA, is directed to cleave the DNA when sgRNA 9860 binds to the targeted complementary DNA sequence associated with a PAM. The composition of the LNP is summarized in Table 13. LNP-g9860 comprises four lipids at the following molar ratios: 50 mol % Lipid A, 9 mol % DSPC, 38 mol % cholesterol, and 3 mol % PEG2k-DMG and is formulated in aqueous buffer composed of 50 mM Tris-HCl, 45 mM NaCl, 5% (w/v) sucrose, at pH 7.4. The N:P ratio is about 6, and the gRNA:Cas9 mRNA ratio is about 1:2 by weight.

TABLE 13
Lipid Nanoparticle (LNP-g9860) Composition.

| Component | Description |
|---|---|
| Active Pharmaceutical Components | Cas9 mRNA |
| | sgRNA (gRNA9860) |
| Lipid Excipients | Lipid A: (9Z,12Z)-3-((4,4- |
| | bis(octyloxy)butanoyl)oxy)-2-((((3- |
| | (diethylamino)propoxy)carbonyl)oxy)methyl)propyl |
| | octadeca-9,12-dienoate |
| | Cholesterol |
| | DSPC |
| | PEG2K-DMG |
| Other Excipients | Tris, NaCl, Sucrose |
| | WFI |

[0702] Single guide RNA. The single guide RNA (sgRNA 9860) used in LNP-g9860 is a 100-mer oligonucleotide containing a 20-nucleotide sequence that is complementary to the target region in intron 1 of the human ALB gene. The target sequence recognized by g9860 is conserved in the cynomolgus monkey mfAlb gene intron 1. The sequence for g9860 is set forth in SEQ ID NOs: 68 and 100. Chemical modifications are incorporated into the 100-mer during synthesis, which include phosphorothioate (PS) linkages at the 5′- and 3′-end of the sgRNA and 2′-O-methyl modifications to some of the sugars of the RNA.

[0703] Cas9 mRNA. The Cas9 messenger RNA (mRNA) used in LNP-g9860 is based on the Cas9 protein sequence from Streptococcus pyogenes. The Cas9-encoding mRNA (SEQ ID NO: 1, with a coding sequence (CDS) set forth in SEQ ID NO: 2), is approximately 4400 nucleotides in length. The sequence contains a 5′ cap, a 5′ untranslated region (UTR), an open reading frame (ORF) encoding the Cas9 protein, a 3′ UTR, and a polyA tail. The 5′ cap is generated co-transcriptionally by use of a synthetic cap analogue structure, known as anti-reverse cap analogue (ARCA). The uracils in the mRNA sequence have been completely replaced by a modified N¹ methylpseudouridine during the in vitro transcription. The 5′ end of the mRNA has a synthetic cap analog structure. The poly-A tail is approximately 100 nucleotides.

### LNP-g666

[0704] LNP-g666 was developed for use in targeting mouse Alb intron 1. LNP-g666 is the same as LNP-g9860, except human-albumin-targeting g9860 is replaced with g666, a guide RNA targeting mouse albumin intron 1. The sequence for g666 is set forth in SEQ ID NOS: 166 and 167.

rAAV8 Vector

[0705] A recombinant AAV8 (rAAV8) vector was developed to carry the DNA insertion templates. The rAAV8 vector carrying the DNA insertion templates is a non-replicating vector that is an AAV-based vector derived from AAV serotype 8. The genome is a single-stranded deoxyribonucleic acid (DNA), comprising inverted terminal repeats (ITR) at each end. The ITRs flank the promoterless insertion template. The AAV ITRs flanking the cassette were derived from AAV2. The DNA insertion templates delivered by rAAV8 vector can be designed as promoterless templates, thus relying on the targeted ALB locus promoter for expression.

### Example 2. Development of Insertion System and Reagents for Treatment of Pompe Disease

[0706] A system for nuclease-mediated insertion (e.g., CRISPR/Cas) of an anti-CD63:GAA transgene or an anti-TfR:GAA transgene into a specific locus (e.g., albumin intron 1) was developed to produce durable expression of anti-CD63:GAA or anti-TfR:GAA, including when administered to neonates.

[0707] Exemplary components of the system for insertion for anti-CD63:GAA, including those used in subsequent examples, are described in more detail below. See FIGS. 31-33. The anti-CD63:GAA DNA template in the working examples described below is brought into the liver by a recombinant AAV8 vector, and the CRISPR/Cas9 RNA components (Cas9 mRNA and sgRNA) are delivered to the liver by LNP-mediated delivery (FIGS. 31 and 33). The anti-CD63:GAA protein produced by the liver is targeted to lysosomes in the muscle by targeting CD63, which is a rapidly internalizing protein highly expressed in the muscle. See FIG. 32. Single guide RNA, LNP-g9860, Cas9 mRNA, and LNP-g666 design and selection were as described in Example 1.

[0708] Exemplary components of the system for anti-TfR:GAA, including those used in subsequent examples, are described in more detail below. See FIGS. 34-36. The anti-TfR:GAA DNA templates in the working examples described below are brought into the liver by a recombinant AAV8 vector, and the CRISPR/Cas9 RNA components (Cas9 mRNA and sgRNA) are delivered to the liver by LNP-mediated delivery (FIGS. 34 and 36). The anti-TfR:GAA protein produced by the liver is targeted the muscle and CNS by targeting TfR, which is expressed in muscle and on brain endothelial cells. Transcytosis of TfR in these cells enables blood-brain-barrier crossing. See FIG. 35. Single guide RNA, LNP-g9860, Cas9 mRNA, and LNP-g666 design and selection were as described in Example 1.

### DNA Template Design and Selection

[0709] We engineered a DNA template for insertion of a nucleic encoding anti-CD63:GAA fusions in which the C-terminus of a single-chain fragment variable (scFv) is fused to the N-terminus of amino acids 70-952 of GAA with a glycine-serine linker. The GAA (70-952) sequence is set forth in SEQ ID NO: 727. The fusion protein encoded by the DNA template is set forth in SEQ ID NO: 733. A splice acceptor site is encoded upstream of the anti-CD63:GAA transgene, and a polyadenylation sequence is encoded downstream of the anti-CD63:GAA transgene. The splice acceptor sequence at the 5′ end of the transgene was derived from mouse Alb exon 2 splice acceptor. The polyadenylation sequence at the 3′ end of the transgene was derived from simian virus 40 (SV40).

[0710] We engineered DNA templates for insertion of a nucleic encoding anti-TfR:GAA fusions in which the C-terminus of a single-chain fragment variable (scFv) is fused to the N-terminus of amino acids 70-952 of GAA with a glycine-serine linker. The GAA (70-952) sequence is set forth in SEQ ID NO: 727. A splice acceptor site is encoded upstream of the anti-TfR:GAA transgene, and a polyadenylation sequence is encoded downstream of the anti-TfR:GAA transgene. The splice acceptor sequence at the 5′ end of the transgene was derived from mouse Alb exon 2 splice acceptor. The polyadenylation sequence at the 3′ end of the transgene was derived from simian virus 40 (SV40).

rAAV8 Vector

[0711] A recombinant AAV8 (rAAV8) vector was developed to carry the DNA insertion templates. The rAAV8 vector carrying the anti-CD63:GAA DNA template (REGV044) is a non-replicating vector that is an AAV-based vector derived from AAV serotype 8. The genome is a single-stranded deoxyribonucleic acid (DNA), comprising inverted terminal repeats (ITR) at each end. The ITRs flank the anti-CD63:GAA promoterless insertion template. The AAV ITRs flanking the cassette were derived from AAV2. The anti-CD63:GAA DNA template delivered by rAAV8 vector was designed as a promoterless template, thus relying on the targeted ALB locus promoter for expression.

[0712] The rAAV8 vector carrying the anti-TfR:GAA DNA template is a non-replicating vector that is an AAV-based vector derived from AAV serotype 8. The genome is a single-stranded deoxyribonucleic acid (DNA), comprising inverted terminal repeats (ITR) at each end. The ITRs flank the anti-TfR:GAA promoterless insertion template. The AAV ITRs flanking the cassette were derived from AAV2. The anti-TfR:GAA DNA template delivered by rAAV8 vector was designed as a promoterless template, thus relying on the targeted ALB locus promoter for expression.

### Example 3. Generation, Selection and Characterization of Immunoglobulin Molecules

[0713] Anti-human transferrin receptor (hTfR) antibodies were generated and screened for the ability to bind hTfR and for lack of strong blocking of human transferrin-hTfR binding.

[0714] Anti-hTfR Generation. VelocImmune mice were immunized with a recombinant protein comprising human transferrin receptor extracellular domain fused at N-terminus to a 6-His tag (referred to as human 6×His-TfR) as immunogen via subcutaneous footpad injection with Alum:CpG adjuvant. Mice bleeds were collected prior to the initial immunization injection and post-boost injections, and the immune sera were subjected to antibody titer determination using a human TfR specific enzyme-linked immunosorbent assay (ELISA). In this assay serum samples in serial dilutions were added to the immunogen coated plates and plate-bound mouse IgG were detected using an HRP-conjugated anti-mouse IgG antibody. Titer of a tested serum sample is defined as the extrapolated dilution factor of the sample that produces a binding signal two times of the signal of the buffer alone control sample. The mice with optimal anti-TfR antibody titers were selected and subjected to a final boost 3-5 days prior to euthanasia and splenocytes from these mice were harvested and subject to antibody isolation using B cell sorting technology (BST).

[0715] TfR specific antibodies of isolated antibodies were isolated and characterized. Two hundred and fourteen TfR-binding antibodies were cloned into single chain fragment variables (scFvs) in complementary orientations with either the variable heavy chain followed by the variable light chain (V_{H}-V_{K}), or the variable light chain followed by the variable heavy chain (V_{K}-V_{H}), and as fragment antigen-binding regions (Fabs). Conditioned media of CHO cell culture containing the scFvs or Fabs were tested for the ability to bind hTfR proteins and hTfR-expressing cells.

### Example 4. Binding Kinetics of 32 Anti-hTfR Primary Supernatants from CHO

[0716] Biacore binding kinetics assays were conducted for the interaction of 32 anti-human TfR IgG1 monoclonal antibodies from CHO supernatants with TfR reagents at 25° C.

TABLE 14
Monoclonal Antibody Clones Tested

| mAb# | AbID# | Source |
|---|---|---|
| 1 | 12795B | primary supernatant |
| 2 | 12798B | primary supernatant |
| 3 | 12799B | primary supernatant |
| 4 | 12801B | primary supernatant |
| 5 | 12802B | primary supernatant |
| 6 | 12808B | primary supernatant |
| 7 | 12812B | primary supernatant |
| 8 | 12834B | primary supernatant |
| 9 | 12835B | primary supernatant |
| 10 | 12839B | primary supernatant |
| 11 | 12841B | primary supernatant |
| 12 | 12843B | primary supernatant |
| 13 | 12844B | primary supernatant |
| 14 | 12845B | primary supernatant |
| 15 | 12847B | primary supernatant |
| 16 | 12848B | primary supernatant |
| 17 | 12850B | primary supernatant |
| 18 | 31863B | primary supernatant |
| 19 | 31874B | primary supernatant |
| 20 | 12816B | primary supernatant |
| 21 | 12833B | primary supernatant |
| 22 | 69261 | primary supernatant |
| 23 | 69263 | primary supernatant |
| 24 | 69305 | primary supernatant |
| 25 | 69307 | primary supernatant |
| 26 | 69323 | primary supernatant |
| 27 | 69326 | primary supernatant |
| 28 | 69329 | primary supernatant |
| 29 | 69331 | primary supernatant |
| 30 | 69332 | primary supernatant |
| 31 | 69340 | primary supernatant |
| 32 | 69348 | primary supernatant |
| 33 | REGN1945 | |

[0717] Reagents used:
[0718] REGN2431 (hmm.hTfRC; 79210 g/mol molecular weight), having the amino acid sequence:

(SEQ ID NO: 639)
HHHHHHEQKLISEEDLGGEQKLISEEDLCKGVEPKTECERLAGTESPVRE
EPGEDFPAARRLYWDDLKRKLSEKLDSTDFTGTIKLLNENSYVPREAGSQ
KDENLALYVENQFREFKLSKVWRDQHFVKIQVKDSAQNSVIIVDKNGRLV
YLVENPGGYVAYSKAATVTGKLVHANFGTKKDFEDLYTPVNGSIVIVRAG
KITFAEKVANAESLNAIGVLIYMDQTKFPIVNAELSFFGHAHLGTGDPYT
PGFPSFNHTQFPPSRSSGLPNIPVQTISRAAAEKLFGNMEGDCPSDWKTD
STCRMVTSESKNVKLTVSNVLKEIKILNIFGVIKGFVEPDHYVVVGAQRD
AWGPGAAKSGVGTALLLKLAQMFSDMVLKDGFQPSRSIIFASWSAGDFGS
VGATEWLEGYLSSLHLKAFTYINLDKAVLGTSNFKVSASPLLYTLIEKTM
QNVKHPVTGQFLYQDSNWASKVEKLTLDNAAFPFLAYSGIPAVSFCFCED
TDYPYLGTTMDTYKELIERIPELNKVARAAAEVAGQFVIKLTHDVELNLD
YERYNSQLLSFVRDLNQYRADIKEMGLSLQWLYSARGDFFRATSRLTTDF
GNAEKTDRFVMKKLNDRVMRVEYHFLSPYVSPKESPFRHVFWGSGSHTLP
ALLENLKLRKQNNGAFNETLFRNQLALATWTIQGAANALSGDVWDIDNE
F.

[0719] REGN2054 (mf TFRC ecto-mmh; 78500 g/mol molecular weight): monomeric monkey (cyno) Tfrc ectodomain (amino acids C89-F760,
   Accession #:XP_045243212.1) with a c-terminal myc-myc-hexahistidine tag containing a GG linker (underlined) between the 2 myc epitope sequences

(EQKLISEEDLGGEQKLISEEDLHHHHHH(SEQ ID NO: 640)).

[0720] Equilibrium dissociation constants (K_{D}) for the interaction of anti-TfR monoclonal antibodies with human and Fascicularis monkey TfR ecto domain recombinant proteins were determined using a real-time surface plasmon resonance (SPR) based Biacore S200 biosensor. All binding studies were performed in 10 mM HEPES, 150 mM NaCl, 3 mM EDTA, and 0.05% v/v surfactant Tween-20, pH 7.4 (HBS-EP) running buffer at 37° C. The Biacore CM5 sensor surface was first derivatized by amine coupling with a monoclonal mouse anti-human Fc antibody (REGN2567) followed by a step to capture anti-TfR monoclonal antibodies in CHO conditioned media. Human TfR extracellular domain expressed with a C-terminal myc-myc-hexahistidine tag (hTFR-mmh; REGN2431) or monkey TfR extracellular domain expressed with a C-terminal myc-myc-hexahistidine tag (mfTFR-mmh; REGN2054) at concentrations of 100 nM in HBS-EP running buffer were injected at a flow rate of 50 PL/min for 2 minutes. The dissociation of TfR bound to anti-TfR monoclonal antibodies was monitored for 3 minutes in HBS-EP running buffer. At the end of each cycle, the anti-TfR monoclonal antibodies capture surface was regenerated using a 12-sec injection of 20 mM H₃PO₄. The association rate (ka) and dissociation rate (kd) were determined by fitting the real-time binding sensorgrams to a 1:1 binding model with mass transport limitation using Scrubber 2.0c software. The dissociation equilibrium constant (K_{D}) and dissociative half-life (t½) were calculated from the kinetic rate constants as:

$${K}_{D} ( M ) = \frac{Kd}{ka} ,$$

$$and$$

$$t \frac{1}{2} ( min ) = \frac{ln ( 2 )}{60 * kd}$$

[0721] The equilibrium binding constant and the kinetic binding constants are summarized in Table 15 and Table 16 for human TfR and monkey TfR, respectively. At 25° C., anti-TfR monoclonal antibodies bound to hTfR-mmh with K_{D} values ranging from 65.6 μM to 41 nM, as shown in Table 15. Anti-TFR monoclonal antibodies bound to mfTFR-mmTh with K_{D} values ranging from 1.16 nM to 20.5 nM, as shown in Table 16.

[0722] Results are set forth below.

TABLE 15
Equilibrium and kinetic binding parameters for the interaction of hTFR-
mmh with anti-TfR monoclonal antibodies (bivalent IgG) at 25° C.

| | mAb | | | | | |
|---|---|---|---|---|---|---|
| | Capture | 100 nM Ag | kₐ | k_{d} | K_{D} | t½ |
| Molecule | Level (RU) | Bound (RU) | (1/Ms) | (1/s) | (M) | (min) |
| 12795B | 3344 | 883 | 1.22E+05 | <1.00E−05 | 8.23E−11 | >1155^{#} |
| 12798B | 4552 | 1151 | 1.63E+05 | 6.33E−05 | 3.87E−10 | 182.6 |
| 12799B | 2388 | 699 | 7.76E+04 | 6.62E−05 | 8.51E−10 | 174.5 |
| 12801B | 4720 | 598 | 8.19E+04 | 4.19E−05 | 5.13E−10 | 276.0 |
| 12802B | 2828 | 903 | 1.23E+05 | 2.92E−05 | 2.36E−10 | 395.4 |
| 12808B | 4336 | 964 | 1.19E+05 | 1.07E−04 | 8.94E−10 | 108.5 |
| 12812B | 2222 | 11 | 4.33E+05 | 1.31E−03 | 3.02E−09 | 8.8 |
| 12834B | 3837 | 11 | 6.00E+05 | 4.39E−03 | 7.00E−09 | 2.6 |
| 12835B | 3276 | 1146 | 1.34E+05 | 4.17E−04 | 3.11E−09 | 27.7 |
| 12839B | 5192 | 660 | 1.18E+05 | 5.33E−05 | 4.48E−10 | 216.9 |
| 12841B | 2895 | 1151 | 1.73E+05 | 1.16E−04 | 6.70E−10 | 99.8 |
| 12843B | 3080 | 854 | 9.42E+04 | 1.68E−04 | 1.78E−09 | 68.8 |
| 12844B | 2869 | 946 | 1.31E+05 | 1.22E−04 | 9.35E−10 | 95.0 |
| 12845B | 2911 | 1104 | 1.68E+05 | 1.99E−04 | 1.18E−09 | 57.9 |
| 12847B | 4425 | 895 | 1.05E+05 | 1.71E−04 | 1.62E−09 | 67.6 |
| 12848B | 4530 | 823 | 1.01E+05 | 4.99E−05 | 4.94E−10 | 231.6 |
| 12850B | 2990 | 725 | 8.37E+04 | 1.76E−05 | 2.15E−10 | 656.8 |
| 31863B | 5490 | 1083 | 1.52E+05 | <1.00E−05 | 6.56E−11 | >1155^{#} |
| 31874B | 5594 | 904 | 1.38E+05 | 1.15E−04 | 8.36E−10 | 100.5 |
| 12816B | 3377 | 357 | 5.79E+04 | 3.36E−04 | 5.80E−09 | 34.3 |
| 12833B | 3972 | 409 | 7.20E+04 | 2.52E−04 | 3.51E−09 | 45.9 |
| 69261 | 3546 | 462 | 7.00E+04 | 8.08E−05 | 1.16E−09 | 142.9 |
| 69263 | 180 | 150 | 1.77E+05 | 1.15E−03 | 6.50E−09 | 10.0 |
| 69305 | 2726 | 6 | NB* | NB* | NB* | NB* |
| 69307 | 2349 | 1285 | 1.90E+05 | 4.26E−05 | 2.26E−10 | 271.1 |
| 69323 | 4506 | 465 | 7.34E+04 | 1.80E−04 | 2.45E−09 | 64.1 |
| 69326 | 1709 | 680 | 1.15E+05 | 2.56E−04 | 2.22E−09 | 45.1 |
| 69329 | 1573 | 1100 | 1.92E+05 | 1.86E−04 | 9.70E−10 | 62.2 |
| 69331 | 4617 | 87 | 1.14E+05 | 4.66E−03 | 4.10E−08 | 2.5 |
| 69332 | 3915 | 9 | NB* | NB* | NB* | NB* |
| 69340 | 3226 | 999 | 1.44E+05 | 6.23E−05 | 4.29E−10 | 185.4 |
| 69348 | 2848 | 680 | 1.06E+05 | 1.72E−04 | 1.62E−09 | 67.2 |
| REGN1945 | 4011 | 6 | NB | NB | NB | NB |

^{#}indicates no dissociation was observed under the current experimental conditions and the kd value was manually fixed at 1.00E−05 s⁻¹ while fitting the real time binding sensorgrams.
*NB indicates that no binding was observed under the current experimental conditions.

TABLE 16
Equilibrium and kinetic binding parameters for the interaction of mfTfR-
mmh with anti-TfR monoclonal antibodies (bivalent IgG) at 25° C.

| | mAb | | | | | |
|---|---|---|---|---|---|---|
| | Capture | 100 nM Ag | kₐ | k_{d} | K_{D} | t½ |
| Molecule | Level (RU) | Bound (RU) | (1/Ms) | (1/s) | (M) | (min) |
| 12795B | 3334 | 364 | 6.10E+04 | 7.13E−05 | 1.16E−09 | 162.0 |
| 12798B | 4542 | 508 | 7.90E+04 | 1.29E−03 | 1.63E−08 | 9.0 |
| 12799B | 2384 | 651 | 8.64E+04 | 1.62E−04 | 1.88E−09 | 71.2 |
| 12801B | 4684 | 159 | 6.40E+04 | 6.53E−04 | 1.02E−08 | 17.7 |
| 12802B | 2819 | 464 | 7.05E+04 | 5.29E−04 | 7.51E−09 | 21.8 |
| 12808B | 4329 | 626 | 7.85E+04 | 4.54E−04 | 5.78E−09 | 25.5 |
| 12812B | 2220 | 1 | NB* | NB* | NB* | NB* |
| 12834B | 3820 | 5 | NB* | NB* | NB* | NB* |
| 12835B | 3262 | 254 | 9.51E+04 | 1.68E−03 | 1.77E−08 | 6.9 |
| 12839B | 5170 | 11 | NB* | NB* | NB* | NB* |
| 12841B | 2888 | 4 | NB* | NB* | NB* | NB* |
| 12843B | 3072 | 399 | 7.90E+04 | 1.18E−03 | 1.50E−08 | 9.8 |
| 12844B | 2857 | 437 | 7.59E+04 | 7.35E−04 | 9.68E−09 | 15.7 |
| 12845B | 2906 | 13 | NB* | NB* | NB* | NB* |
| 12847B | 4420 | 702 | 9.92E+04 | 3.33E−04 | 3.36E−09 | 34.7 |
| 12848B | 4524 | 261 | 5.29E+04 | 9.62E−04 | 1.82E−08 | 12.0 |
| 12850B | 2985 | 87 | 1.01E+05 | 1.57E−03 | 1.55E−08 | 7.3 |
| 31863B | 5480 | 145 | 1.63E+05 | 2.98E−03 | 1.83E−08 | 3.9 |
| 31874B | 5557 | 26 | 6.91E+05 | 9.96E−03 | 1.44E−08 | 1.2 |
| 12816B | 3376 | 315 | 6.52E+04 | 4.85E−04 | 7.44E−09 | 23.8 |
| 12833B | 3966 | 346 | 6.92E+04 | 4.86E−04 | 7.02E−09 | 23.8 |
| 69261 | 3537 | 331 | 6.83E+04 | 4.03E−04 | 5.90E−09 | 28.7 |
| 69263 | 181 | 77 | 1.97E+05 | 3.78E−03 | 1.92E−08 | 3.1 |
| 69305 | 2725 | −7 | NB* | NB* | NB* | NB* |
| 69307 | 2344 | 3 | NB* | NB* | NB* | NB* |
| 69323 | 4500 | 24 | 5.58E+05 | 1.06E−02 | 1.90E−08 | 1.1 |
| 69326 | 1707 | 9 | NB* | NB* | NB* | NB* |
| 69329 | 1571 | 8 | NB* | NB* | NB* | NB* |
| 69331 | 4611 | 26 | 4.89E+05 | 1.00E−02 | 2.05E−08 | 1.2 |
| 69332 | 3897 | 1 | NB* | NB* | NB* | NB* |
| 69340 | 3219 | 634 | 8.92E+04 | 7.23E−04 | 8.11E−09 | 16.0 |
| 69348 | 2851 | 433 | 9.60E+04 | 4.61E−04 | 4.80E−09 | 25.1 |
| REGN1945 | 4009 | 4 | NB | NB | NB | NB |

*NB indicates that no binding was observed under the current experimental conditions.

### Example 5. Anti-TfR Antibodies Blocking Human TfRC Monomer Binding to Human Holo-Transferrin by ELISA

[0723] An ELISA-based blocking assay was developed to determine the ability of anti-Transferrin Receptor (TfR) antibodies to block the binding of human Transferrin Receptor to human holo-transferrin ligand.

TABLE 17
Reagents

| Reagent | Source |
|---|---|
| Human Transferrin polyclonal goat IgG antibody | R&D Systems |
| Human Holo-Transferrin protein | R&D Systems |
| His-myc-myc-hTFRC ecto | Regeneron |
| HRP conjugated c-Myc polyclonal rabbit IgG antibody | Novus Biologicals |
| 1X PBS | Irvine Scientific |
| 1X PBST (0.05% tween-20 in PBS) | Sigma |
| BSA: albumin solution from bovine serum, 30% | Sigma |
| 3-3′,5-5′-tetramethylbenzidine (TMB) Substrate A | BD Biosciences |
| 3-3′,5-5′-tetramethylbenzidine (TMB) Substrate B | BD Biosciences |
| 2N Sulfuric Acid | VWR |
| Reacti-Bind 96-well plates corner notch | ThermoFisher Scientific |
| VWR 96-Well Deep Well Plates 0.5 ML | VWR |
| Aquamax Plate Washer 2000 | Molecular Devices |
| VICTOR ™ X4 Multilabel Plate Reader | PerkinElmer |

[0724] The human Transferrin Receptor recombinant protein, hTFRC, used in the experiment was comprised of hTfR extracellular domain (amino acids C89-F760) expressed with an N-terminal 6-Histidine-myc-myc tag (Hmm.hTfrc (REGN2431): Monomeric human Tfrc ectodomain (amino acids C89-F760, Accession #: NP_001121620.1) with an N-terminal hexahistidine-myc-myc-tag containing a GG linker (underlined) between the 2 myc epitope sequences (HHHHHHEQKLISEEDLGGEQKLISEEDL) (amino acids 1-28 of SEQ ID NO: 641)). The human holo-transferrin ligand protein (holo-Tf) isolated from human plasma was purchased from R&D Systems.

[0725] In the blocking assay, the anti-human Transferrin goat IgG polyclonal antibody (anti-hTf pAb) was passively absorbed at a concentration of 2 micrograms/mL in PBS on a 96-well microtiter plate overnight at 4° C. Nonspecific binding sites were subsequently blocked using a 0.5% (w/v) solution of BSA in PBS for 1 hour at room temperature. To the same plate, human holo-Tf was then added at a concentration of 1 micrograms/mL in PBS+0.5% BSA for 2 hours at room temperature. In a separate set of 96-well microtiter plates, solutions of 300 μM Hmm-hTFRC were mixed with TFRC antibody supernatants at 2-fold dilution. After a 1-hour incubation, the mixtures were transferred to the human holo-Tf microtiter plates. After another hour incubation at room temperature, plates were washed, and plate-bound Hmm-hTFRC was detected with horseradish peroxidase (HRP) conjugated rabbit anti-Myc polyclonal antibody. The plates were developed using TMB substrate solution according to the manufacturer's recommended procedure and absorbance at 450 nm was measured on a Victor™ Multilabel Plate Reader.

[0726] Percent blocking for the tested anti-TfR antibodies was calculated using the formula below:

$$\% Blocking = 100 - [ \frac{( Test antibody - Buffer alone without Hmm - hTFRC )}{( Hmm - hTFRC alone - Buffer alone without Hmm - hTFRC )} ] \times 100$$

[0727] Antibodies that blocked binding of Hmm-hTFRC to human holo-Tf equal or more than 50% were classified as blockers.

[0728] The ability of the anti-TfR antibody to block human TFRC binding to human holo-Tf was evaluated using an ELISA-based blocking assay. In this assay, a fixed concentration of Hmm-hTFRC was pre-incubated with anti-TfR antibody containing supernatant before binding to plate immobilized human holo-Tf protein, and the plate-bound Hmm-hTFRC was detected with HRP-conjugated c-Myc specific rabbit polyclonal antibodies.

[0729] Thirty-two anti-TfR antibodies cloned into single chain fragment variables (scFvs) in complementary orientations with either the variable heavy chain followed by the variable light chain (V_{H}-VK), or the variable light chain followed by the variable heavy chain (V_{K}-V_{H}) and also as fragment antigen-binding regions (Fabs). All ninety-six anti-TfR antibody supernatants were tested for the ability to block human TFRC binding to human holo-Tf. Ninety-four anti-TfR antibody supernatants showed no or low blocking activity with percentage blocking ranging from 0% to 45%, and these antibodies (Fabs or scFvs formats) were classified as non-blockers (Table 18). Only two Fab supernatants had blocking activity greater than 50%, with % blocking values of 64% and 78% respectively.

TABLE 18
Summary of Anti-TfR scFv and Fab Supernatants Ability to
Block Human TFRC binding to Immobilized Human Holo-Tf

| | Blocking of Hmm-hTFRC Binding to Human | | |
|---|---|---|---|
| | Holo-Tf, % Blocking | | |
| AbPID | Fab Format | scFv (V_{K}-V_{H}) Format | scFv (V_{H}-V_{K}) Format |
| 12795B | 44 | 23 | 45 |
| 12798B | 10 | 10 | 0 |
| 12799B | 5 | 10 | 26 |
| 12801B | 45 | 27 | 37 |
| 12802B | 15 | 17 | 11 |
| 12808B | 16 | 18 | 19 |
| 12812B | 14 | 12 | 19 |
| 12816B | 14 | 14 | 16 |
| 12833B | 64 | 40 | 22 |
| 12834B | −2 | 11 | −3 |
| 12835B | 78 | 37 | 45 |
| 12839B | 13 | 6 | 23 |
| 12841B | 29 | 1 | 10 |
| 12843B | 10 | 8 | 17 |
| 12844B | 20 | 10 | 12 |
| 12845B | 11 | 3 | 18 |
| 12847B | 3 | 13 | 11 |
| 12848B | 13 | 9 | 19 |
| 12850B | 18 | 8 | 10 |
| 31863B | 24 | 7 | 13 |
| 31874B | 16 | −1 | 14 |
| 69261 | 11 | 16 | 19 |
| 69263 | 14 | 4 | 14 |
| 69305 | 3 | 5 | 3 |
| 69307 | 12 | 12 | 9 |
| 69323 | 12 | 17 | 7 |
| 69326 | −2 | 12 | 18 |
| 69329 | 8 | 19 | 25 |
| 69331 | 9 | 13 | 7 |
| 69332 | 18 | 22 | 6 |
| 69340 | 3 | 13 | 6 |
| 69348 | 40 | 16 | 0 |

### Example 6. Anti-TFRC:GAA Gene Therapy

[0730] In this example, the ability of various anti-TFRC molecules to cross the blood-brain barrier and localize to the parenchyma of the brain was evaluated. Delivery of the molecules via episomal AAV liver depot was also evaluated along with rescue of the glycogen storage phenotype in various tissues.

### In Vivo Screening of Anti-hTFRC Scfv by HDD

[0731] To further evaluate the anti-human TFRC antibodies that were screened for binding in vitro, in vivo mouse studies in Tfrc^{hum/hum} knock-in mice were performed to evaluate blood-brain-barrier (BBB) crossing. This screen of 31 antibodies revealed 11 that had mature hGAA protein in brain homogenate detected by Western blot.

### GAA Fusions by Hydrodynamic Delivery (HDD)

[0732] Human TFRC knock-in mice were injected with DNA plasmids expressing the various anti-hTFRC antibodies in the anti-hTFRC scfv:2×G₄S(SEQ ID NO: 617):hGAA format under the liver-specific mouse TTR promoter. Mice received 50 μg of DNA in 0.9% sterile saline diluted to 10% of the mouse's body weight (0.1 mL/g body weight). Forty-eight hours post-injection, tissues were dissected from mice immediately after sacrifice by CO₂ asphyxiation, snap frozen in liquid nitrogen, and stored at −80° C.

### Western Blot: (FIGS. 2A-2C)

[0733] Tissue lysates were prepared by lysis in RIPA buffer with protease inhibitors (1861282, Thermo Fisher, Waltham, MA, USA). Tissue lysates were homogenized with a bead homogenizer (FastPrep5, MP Biomedicals, Santa Ana, CA, USA). Cells or tissue lysates were run on SDS-PAGE gels using the Novex system (LifeTech Thermo, XPO4200BOX, LC2675, LC3675, LC2676). Gels were transferred to low-fluorescence polyvinylidene fluoridev (PVDF) membrane (IPFLO7810, LI-COR, Lincoln, NE, USA) and stained with Revert 700 Total Protein Stain (TPS; 926-11010 LI-COR, Lincoln, NE, USA), followed by blocking with Odyssey blocking buffer (927-500000, LI-COR, Lincoln, NE, USA) in Tris buffer saline with 0.1% Tween 20 and staining with antibodies against GAA (ab137068, Abcam, Cambridge, MA, USA), or anti-GAPDH (ab9484, Abcam, Cambridge, MA, USA) and the appropriate secondary (926-32213 or 925-68070, LI-COR, Lincoln, NE, USA). Blots were imaged with a LI-COR Odyssey CLx.

[0734] Protein band intensity was quantified in LI-COR Image Studio software. The quantification of the mature 77 kDa GAA band for each sample was determined by first normalizing to the lane's TPS signal, then normalizing to GAA levels in the serum (loading control and liver expression control, respectively). Values were then compared to the positive control group anti-mouse TFRC scfv:hGAA in Wt mice, and negative control group anti-mTFRC scfv:hGAA in Tfrc^{hum/hum} mice (FIGS. 2A-2C, Table 19).

TABLE 19
Quantification of mature hGAA protein in brain homogenate
from mice treated HDD with anti-hTFRC scfv:hGAA plasmids

| | | Mature hGAA protein in brain |
|---|---|---|
| Treatment group | Genotype | (normalized to positive control) |
| anti-mTFRCscfv:hGAA | Wt | 1.00 ± 0.43* |
| (positive control) | | |
| anti-mTFRCscfv:hGAA | Tfrc^{hum/hum} | 0.02 ± 0.03 |
| (negative control) | | |
| 69261scfv:hGAA | Tfrc^{hum/hum} | 0.67 ± 0.50 |
| 69307scfv:hGAA | Tfrc^{hum/hum} | 1.08 ± 0.19 |
| 69323scfv:hGAA | Tfrc^{hum/hum} | 0.91 ± 0.46 |
| 69329scfv:hGAA | Tfrc^{hum/hum} | 0.65 ± 0.13 |
| 69340scfv:hGAA | Tfrc^{hum/hum} | 0.55 ± 0.58 |
| 69348scfv:hGAA | Tfrc^{hum/hum} | 0.50 ± 0.05 |
| 12795scfv:hGAA | Tfrc^{hum/hum} | 0.27 ± 0.20 |
| 12798scfv:hGAA | Tfrc^{hum/hum} | 0.72 ± 0.42 |
| 12799scfv:hGAA | Tfrc^{hum/hum} | 1.05 ± 0.51* |
| 12801scfv:hGAA | Tfrc^{hum/hum} | 0.49 ± 0.18 |
| 12802scfv:hGAA | Tfrc^{hum/hum} | 0.29 ± 0.27 |
| 12839scfv:hGAA | Tfrc^{hum/hum} | 1.29 ± 0.27** |
| 12841scfv:hGAA | Tfrc^{hum/hum} | 1.72 ± 0.06*** |
| 12843scfv:hGAA | Tfrc^{hum/hum} | 1.79 ± 0.85*** |
| 12845scfv:hGAA | Tfrc^{hum/hum} | 3.08 ± 0.92*** |
| 12847scfv:hGAA | Tfrc^{hum/hum} | 1.24 ± 0.30 |
| 12848scfv:hGAA | Tfrc^{hum/hum} | 0.59 ± 0.16 |
| 12850scfv:hGAA | Tfrc^{hum/hum} | 0.47 ± 0.05 |

Data quantified from western blot as arbitrary units (FIGS. 2A-2C).
All values are mean ± SD, n = 3-6 per group.
One Way ANOVA vs. negative control anti-mTFRC scfv:hGAA in Tfrc^{hum/hum} mice;
*p < 0.05;
**p < 0.005;
***p < 0.0001

[0735] The control anti-mTRFC that was conjugated to GAA was 8D3 scFv. The 8D3 scFv has the heavy chain amino acid sequence:

(SEQ ID NO: 490)
EVQLVESGGGLVQPGNSLTLSCVASGFTFSNYGMHWIRQAPKKGLEWIAM
IYYDSSKMNYADTVKGRFTISRDNSKNTLYLEMNSLRSEDTAMYYCAVPT
SHYVVDVWGQGVSVTVSS,

and the light chain amino acid sequence:

(SEQ ID NO: 491)
DIQMTQSPASLSASLEEIVTITCQASQDIGNWLAWYQQKPGKSPQLLIYG
ATSLADGVPSRFSGSRSGTQFSLKISRVQVEDIGIYYCLQAYNTPWTFGG
GTKLELK.

Cap1llary Depletion of Brain Samples Following HDD of Anti-hTFRC Scfv:hGAA Plasmids

[0736] Anti-hTFRC scfv:hGAA molecules from Table 19 were tested in a secondary screen in Tfrc^{hum} mice to determine whether hGAA was present in the brain parenchyma, and not trapped in the BBB endothelial cells. Four molecules (12799, 12839, 12843, and 12847) identified in screen as being present in parenchyma based on mature hGAA in the parenchyma fraction on Western blot, as well as high affinity to cyno TFRC.

[0737] Animals were treated HDD as detailed above. Forty-eight hours post-injection, mice were perfused with 30 mL 0.9% saline immediately after sacrifice by CO₂ asphyxiation. A 2 mm coronal slice of cerebrum was taken between bregma and −2 mm bregma and placed in 700 uL physiological buffer (10 mM HEPES, 4 mM KCl, 2.8 mM CaCl₂, 1 mM MgSO₄, 1 mM NaH₂PO₄, 10 mM D-glucose in 0.9% saline pH 7.4) on ice. Brain slices were gently homogenized on ice with a glass dounce homogenizer. An equivalent volume of 26% dextran (MW 70,000 Da) in physiological buffer was added (final 13% dextran) and homogenized 10 more strokes. Parenchyma (supernatant) and endothelial (pellet) fractions were separated by centrifugation at 5,400g for 15 min at 4° C. Anti-hGAA western blot was performed on fractions as detailed above (FIG. 3, Table 20). Blots were also probed with anti-CD31 endothelial marker (Abcam ab182982).

TABLE 20
Quantification of mature hGAA protein in brain parenchyma fractions and BBB
endothelial fractions of mice treated HDD with anti-hTFRC scfv:hGAA plasmids

| | | Mature hGAA protein | Mature hGAA protein | Affinity to |
|---|---|---|---|---|
| | | in brain parenchyma | in brain endothelium | mfTFRC (% |
| | | (normalized to positive | (normalized to positive | of hTFRC |
| Treatment group | Genotype | control) | control) | binding) |
| anti- | Wt | 1.00 | 5.82 | ND |
| mTFRCscfv:hGAA | | | | |
| (positive control) | | | | |
| anti- | Tfrc^{hum/hum} | 0.00 | 0.01 | ND |
| mTFRCscfv:hGAA | | | | |
| (negative control) | | | | |
| 69307scfv:hGAA | Tfrc^{hum/hum} | 1.24 | 10.73 | 0% |
| 69323scfv:hGAA | Tfrc^{hum/hum} | 0.62 | 4.18 | 7% |
| 12798scfv:hGAA | Tfrc^{hum/hum} | 0.91 | 8.37 | 34% |
| 12799scfv:hGAA | Tfrc^{hum/hum} | 0.44 | 3.99 | 126% |
| 12839scfv:hGAA | Tfrc^{hum/hum} | 0.55 | 0.84 | 78% |
| 12841scfv:hGAA | Tfrc^{hum/hum} | 0.78 | 4.23 | 8% |
| 12843scfv:hGAA | Tfrc^{hum/hum} | 1.13 | 12.99 | 75% |
| 12845scfv:hGAA | Tfrc^{hum/hum} | 2.04 | 13.06 | 25% |
| 12847scfv:hGAA | Tfrc^{hum/hum} | 0.60 | 4.96 | 102% |
| 12848scfv:hGAA | Tfrc^{hum/hum} | 0.17 | 1.24 | 29% |
| 12850scfv:hGAA | Tfrc^{hum/hum} | 0.22 | 2.25 | 13% |

hGAA protein quantified from western blot as arbitrary units (FIG. 3).
n = 1 per group.
Affinity to cynomolgus macaque TFRC Luminex data, calculated as percent of binding to hTFRC: (mfTFRC binding ÷ hTFRC binding) × 100

TABLE 21
Quantification of hGAA protein in quadricep of mice
treated HDD with anti-hTFRC scfv:hGAA plasmids

| | | hGAA protein in quadricep |
|---|---|---|
| Treatment group | Genotype | (normalized to positive control) |
| Saline (vehicle) | Tfrc^{hum/hum} | 0.38 ± 0.25 |
| anti-mTFRCscfv:hGAA | Wt | 1.07 ± 0.27 |
| (positive control) | | |
| anti-mTFRCscfv:hGAA | Tfrc^{hum/hum} | 0.56 ± 0.17 |
| (negative control) | | |
| 69307scfv:hGAA | Tfrc^{hum/hum} | 0.58 ± 0.18 |
| 69323scfv:hGAA | Tfrc^{hum/hum} | 1.10 ± 0.19 |
| 12798scfv:hGAA | Tfrc^{hum/hum} | 1.33 ± 0.56 |
| 12799scfv:hGAA | Tfrc^{hum/hum} | 0.67 ± 0.18 |
| 12839scfv:hGAA | Tfrc^{hum/hum} | 1.80 ± 0.18 |
| 12841scfv:hGAA | Tfrc^{hum/hum} | 1.15 ± 0.12 |
| 12843scfv:hGAA | Tfrc^{hum/hum} | 1.78 ± 0.43 |
| 12845scfv:hGAA | Tfrc^{hum/hum} | 1.70 ± 1.33 |
| 12847scfv:hGAA | Tfrc^{hum/hum} | 7.74 ± 9.42 |
| 12848scfv:hGAA | Tfrc^{hum/hum} | 0.82 ± 0.18 |
| 12850scfv:hGAA | Tfrc^{hum/hum} | 0.76 ± 0.34 |

Cap1llary Depletion of Mouse Brain Samples Following Liver-Depot AAV8 Anti-hTFRC Scfv:hGAA Treatment

[0738] To confirm our HDD screen findings in a more long-term treatment model, we treated Tfrc^{hum} mice with anti-hTFRC scfv:hGAA_molecules delivered as episomal liver depot AAV8 anti-hTFRC scfv:GAA under the TTR promoter. We found that all 4 molecules (12799, 12843, 12847 and 12839) delivered mature hGAA to the brain parenchyma when delivered as AAV8.

### AAV Production and In Vivo Transduction

[0739] Recombinant AAV8 (AAV2/8) was produced in HEK293 cells. Cells were transfected with three plasmids encoding adenovirus helper genes, AAV8 rep and cap genes, and recombinant AAV genomes containing transgenes flanked by AAV2 inverted terminal repeats (ITRs). On day 5, cells and medium were collected, centrifuged, and processed for AAV purification. Cell pellets were lysed by freeze-thaw and cleared by centrifugation. Processed cell lysates and medium were overlaid onto iodixanol gradients columns and centrifuged in an ultracentrifuge. Virus fractions were removed from the interface between the 40% and 60% iodixanol solutions and exchanged into 1×PBS with desalting columns. AAV vg (vg=viral genomes) were quantified by ddPCR. AAVs were diluted in PBS+0.001% F-68 Pluronic immediately prior to injection. Tfrc^{hum} mice were dosed with 3e12 vg/kg body weight in a volume of ˜100 uL. Mice were sacrificed 4 weeks post injection and capillary depletion and western blotting were performed as described above (FIG. 4, Table 22).

TABLE 22
Quantification of mature hGAA protein in brain parenchyma fractions and BBB endothelial
fractions of mice treated with liver-depot AAV8 anti-hTFRC scfv:hGAA

| | | Mature hGAA protein in brain | Mature hGAA protein in brain |
|---|---|---|---|
| | | parenchyma (normalized to | endothelium (normalized to |
| Treatment group | Genotype | positive control) | positive control) |
| anti- | Wt | 1.00 | 1.00 |
| mTFRCscfv:hGAA | | | |
| (positive control) | | | |
| anti- | Tfrc^{hum/hum} | 0.02 | 0.01 |
| mTFRCscfv:hGAA | | | |
| (negative control) | | | |
| 12799scfv:hGAA | Tfrc^{hum/hum} | 0.94 | 0.94 |
| 12839scfv:hGAA | Tfrc^{hum/hum} | 0.49 | 0.62 |
| 12843scfv:hGAA | Tfrc^{hum/hum} | 0.61 | 0.63 |
| 12847scfv:hGAA | Tfrc^{hum/hum} | 1.90 | 1.33 |

Data quantified from western blot as arbitrary units (FIG. 4).
n = 1 per group

Rescue of Glycogen Storage Phenotype in Gaa^{-/-}/Tfrc^{hum} Mice with AAV8 Episomal Liver Depot Anti-hTFRC Scfv:GAA

[0740] Anti-hTFRC scfv:GAA molecules in Pompe disease model mice were tested to determine whether anti-hTFRCscfv:GAA rescued the glycogen storage phenotype. The molecules, 12839, 12843, 12847, normalized glycogen to Wt levels. (12799 not tested).

[0741] AAV production and in vivo transduction were performed as above. Gaa^{-/-}/Tfrc^{hum}mice were dosed with 2e12 vg/kg AAV8. Tissues were harvested 4 weeks post-injection and flash-frozen as above. hGAA Western blot was performed as above (FIG. 5, Table 23).

### Glycogen Quantification

[0742] Tissues were dissected from mice immediately after sacrifice by CO₂ asphyxiation, snap frozen in liquid nitrogen, and stored at −80° C. Tissues were lysed on a benchtop homogenizer with stainless steel beads in distilled water for glycogen measurements or RIPA buffer for protein analyses. Glycogen analysis lysates were boiled and centrifuged to clear debris. Glycogen measurements were performed fluorometrically with a commercial kit according to manufacturer's instructions (K646, BioVision, Milpitas, CA, USA). See Table 24 and FIG. 6.

TABLE 23
Quantification of hGAA protein in tissues of Gaa^{-/-}/Tfrc^{hum} mice treated with liver-depot AAV8 anti-hTFRC scfv:hGAA

| Treatment group | n | Serum * | Liver * | Cerebrum ** | Cerebellum ** | Spinal Cord ** | Heart ** | Quadricep ** |
|---|---|---|---|---|---|---|---|---|
| Gaa^{-/-} Untreated | 1 | 0.00 | 0.02 | 0.00 | 0.00 | 0.00 | 0.02 | 0.01 |
| Gaa^{-/-} 12839scfv:hGAA | 3 | 2.42 ± 2.41 | 1.63 ± 0.96 | 0.14 ± 0.12 | 0.13 ± 0.12 | 0.19 ± 0.19 | 0.53 ± 0.52 | 0.14 ± 0.16 |
| Gaa^{-/-} 12843scfv:hGAA | 3 | 2.07 ± 1.35 | 2.23 ± 0.08 | 0.17 ± 0.07 | 0.11 ± 0.05 | 0.17 ± 0.09 | 0.49 ± 0.31 | 0.18 ± 0.06 |
| Gaa^{-/-} 12847scfv:hGAA | 3 | 1.56 ± 0.71 | 1.40 ± 0.13 | 0.25 ± 0.04 | 0.21 ± 0.09 | 0.42 ± 0.19 | 0.58 ± 0.17 | 0.19 ± 0.08 |

Data quantified from western blot as arbitrary units (FIG. 5).
All values are mean ± SD, n = 1-3 per group.
* Total hGAA protein;
** Mature hGAA protein

TABLE 24
Quantification of glycogen in tissues of Gaa^{-/-}/
Tfrc^{hum} mice treated with liver-depot AAV8 anti-hTFRC scfv:hGAA

| Treatment group | Cerebrum | Cerebellum | Spinal Cord | Heart | Quadricep |
|---|---|---|---|---|---|
| Wt Untreated | 0.06 ± 0.04* | 0.01 ± 0.04* | 0.05 ± 0.05* | 0.08 ± 0.02* | 0.34 ± 0.19* |
| Gaa−/− Untreated | 2.34 ± 0.58 | 2.51 ± 0.38 | 3.08 ± 0.23 | 25.30 ± 6.06 | 13.05 ± 0.98 |
| Gaa−/− 12839scfv:hGAA | 0.11 ± 0.03* | 0.46 ± 0.08* | 0.08 ± 0.10* | 0.68 ± 0.68* | 2.15 ± 2.52* |
| Gaa−/− 12843scfv:hGAA | 0.09 ± 0.02* | 0.09 ± 0.08* | 0.13 ± 0.13* | 0.09 ± 0.01* | 1.22 ± 1.39* |
| Gaa−/− 12847scfv:hGAA | 0.05 ± 0.01* | 0.02 ± 0.03* | 0.20 ± 0.33* | 0.11 ± 0.11* | 0.80 ± 0.79* |

All values are glycogen ug/mg tissue, mean ± SD, n = 3-4 per group.
One Way ANOVA
*p < 0.0001 vs. Gaa^{-/-} Untreated group

Rescue of Glycogen Storage in Brain and Muscle in Gaa^{-/-}/Tfrc^{hum} Mice with AAV8 Episomal Liver Depot Anti-hTFRC Scfv:GAA

[0743] Anti-hTFRCscfv:GAA molecules, 12799, 12843, and 12847, were tested in Pompe disease model mice to determine whether they rescued the glycogen storage phenotype. Histology was performed on brain and muscle sections to visualize glycogen in the tissues. All 3 molecules reduced glycogen staining in the brain and muscle.

[0744] AAV production and in vivo transduction were performed as above. Three month old Gaa^{-/-}/Tfrc^{hum} mice were dosed with 4e11 vg/kg AAV8. Four weeks post-injection, tissues were frozen for glycogen analysis as above (Table 25). For histology, animals were perfused with saline (0.9% NaCl), and tissues were drop-fixed overnight in 10% Normal Buffered Formalin. Tissues were washed 3× in PBS and stored in PBS/0.01% sodium azide until embedding. Tissues were embedded in paraffin and 5 um sections were cut from brain (coronal, −2 mm bregma) and quadricep (fiber cross-section). Sections were stained with Periodic Acid-Schiff and Hematoxylin using standard protocols (FIGS. 7A-7D).

TABLE 25
Quantification of glycogen in tissues of Gaa^{-/-}/
Tfrc^{hum} mice treated with liver-depot AAV8 anti-hTFRC scfv:hGAA

| Treatment group | Cerebellum | Quadricep |
|---|---|---|
| Wt Untreated | 0.02 ± 0.03* | 0.55 ± 0.10* |
| Gaa−/− Untreated | 1.91 ± 0.26 | 12.19 ± 3.02 |
| Gaa−/− 12799scfv:hGAA | 0.10 ± 0.06* | 1.34 ± 0.9* |
| Gaa−/− 12843scfv:hGAA | 0.09 ± 0.06* | 1.09 ± 1.27* |
| Gaa−/− 12847scfv:hGAA | 0.07 ± 0.06* | 0.72 ± 0.64* |

All values are glycogen ug/mg tissue, mean ± SD, n = 5-8 per group.
One Way ANOVA
*p < 0.0001 vs. Gaa^{-/-} Untreated group

### Example 7. Iron Assay

[0745] This Example evaluated the effect of anti-TfR antigen-binding proteins on iron homeostasis in mice.

### Validating TFRC Expression in Tfrc^{hum} Mice and Assessing Iron Homeostasis

[0746] To validate that Tfrc^{hum} mice expressed TFRC at physiological levels and had normal iron homeostasis, we compared Tfrc^{hum} mice t0 Wt mice and quantified expression of TFRC in tissues, serum markers, tissue iron content, and transferrin in tissues. Overall, TFRC expression and iron homeostasis was normal in the Tfrc^{hum} mice.

[0747] Six month old Wt mice (11 males, 4 females) and Tfrc^{hum} mice (10 males, 8 females) were analyzed in this experiment. Tissues were dissected from mice immediately after sacrifice by CO₂ asphyxiation, snap frozen in liquid nitrogen, and stored at −80° C.

Tfrc RNA Quantification by qPCR

[0748] Total RNA was isolated from tissues with Trizol following manufacturer protocol (ThermoFisher 15596026). Tfrc RNA was quantified by Tagman qPCR (ThermoFisher) following standard protocols using universal primers to exon 1 that amplify from both Wt and Tfrc^{hum} mice (GCTGCATTGCGGACTGTAGA (SEQ ID NO: 642)/TCCATCATTCTCAGCTGCTACAA (SEQ ID NO: 643)). ΔΔCT values were calculated relative to the Wt male group. Data in Table 26.

### Serum Assays

[0749] Blood was collected from mice by cardiac puncture immediately following CO₂ asphyxiation and serum was separated using serum separator tubes (BD Biosciences, 365967). Serum iron and Total Iron Binding Content (TIBC) were quantified using standard protocols. Serum hepcidin was quantified by ELISA kit (Intrinsic Life Sciences SKU HMC-001). Data in Table 27.

### Tissue Iron Content

[0750] Wet tissue was weighed to achieve uniformity and then dried for 72 hours in an open tube at 56° C. Tissue was then placed in digestion buffer (10% Tricloroacetic acid and 37% HCL) and heated at 65° C. for 48 hours. To assay iron content, the supernatant was placed in a 96 well plate and incubated in a color development solution (Thioglycolic acid, bathophenanthroline acid and sodium acetate). Absorbance was read on a Spectramax i3 by Molecular Devices and Graph Pad Prism was used to interpolate the sample absorbance values read against a standard curve to calculate iron content in the whole piece of tissue. Iron content was then calculated based on dry weight. Data in Table 28.

### Transferrin ELISA

[0751] All tissues were homogenized using a Fastprep-24 5G from MP Biomedicals. Prior to homogenization, tissues were placed in RIPA buffer with phosphatase and HALT protease inhibitors (ThermoFisher), homogenized with their organ specific protocol and then centrifuged to pellet debris. The supernatant was collected and assayed for total protein using a Pierce BCA Protein Assay Kit. Absorbance was measured on a Spectramax i3 by Molecular Devices. Once total protein was measured, all samples were diluted to match the least concentrated sample so loading would be uniform for the ELISA. Kits obtained from Abcam were used to measure the presence of total transferrin in tissue homogenate (Abcam ab157724). Plates were run in accordance with the supplied protocol using the provided reagents and absorbance was read on a Spectramax i3 by Molecular Devices. Graph Pad Prism was used to interpolate the sample absorbance values read against a standard curve. Data in Table 29.

TABLE 26
Tfrc RNA quantification in untreated Wt and Tfrc^{hum} mice

| Genotype | Sex | Liver Tfrc | Quadricep Tfrc | Brain Tfrc |
|---|---|---|---|---|
| Wt | M | 1.02 ± 0.21 | 1.10 ± 0.53 | 1.02 ± 0.21 |
| Wt | F | 1.11 ± 0.64 | 0.60 ± 0.17 | 1.03 ± 0.13 |
| Tfrc^{hum} | M | 1.14 ± 0.28 | 1.02 ± 0.39 | 1.86 ± 0.35* |
| Tfrc^{hum} | F | 0.75 ± 0.22 | 0.43 ± 0.93 | 1.88 ± 0.25* |

All values are ΔΔCT vs. Wt males group, mean ± SD, n = 4-11 per group.
One Way ANOVA
*p < 0.001 vs. Wt sex-matched group

TABLE 27
Serum iron markers in untread Wt and Tfrc^{hum} mice

| Genotype | Sex | Serum Iron ug/dL | Serum TIBC ug/dL | Serum Hepcidin ng/mL |
|---|---|---|---|---|
| Wt | M | 146.73 ± 20.30 | 360.18 ± 27.02 | 416.73 ± 133.04 |
| Wt | F | 125.50 ± 9.04 | 342.25 ± 22.25 | 436.35 ± 143.28 |
| Tfrc^{hum} | M | 173.00 ± 12.77* | 351.20 ± 21.94 | 415.86 ± 101.27 |
| Tfrc^{hum} | F | 156.75 ± 14.18* | 353.50 ± 17.03 | 523.30 ± 175.70 |

All values are mean ± SD, n = 4-11 per group.
All values are within normal physiological range.
One Way ANOVA
*p < 0.05 vs. Wt sex-matched group

TABLE 28
Tissue iron quantification in untread Wt and Tfrc^{hum} mice

| Genotype | Sex | Liver | Spleen |
|---|---|---|---|
| Wt | M | 307.03 ± 32.74 | 1666.38 ± 239.18 |
| Wt | F | 507.45 ± 110.45 | 1833.12 ± 173.36 |
| Tfrc^{hum} | M | 300.00 ± 33.77 | 1818.44 ± 276.86 |
| Tfrc^{hum} | F | 638.46 ± 139.03 | 1695.96 ± 140.02 |

All values are ug/g dry tissue, mean ± SD, n = 4-11 per group.
Values are non-significant (One Way ANOVA vs. Wt sex-matched group).

TABLE 29
Transferrin protein in untreated Wt and Tfrc^{hum} mice (ELISA)

| Genotype | Sex | Serum | Liver | Cerebrum |
|---|---|---|---|---|
| Wt | M | 1191.28 ± 137.03 | 32.61 ± 9.87 | 7.35 ± 1.30 |
| Wt | F | 1270.81 ± 138.42 | 27.01 ± 13.22 | 6.33 ± 0.93 |
| Tfrc^{hum} | M | 1251.40 ± 113.59 | 32.97 ± 7.26 | 7.92 ± 1.63 |
| Tfrc^{hum} | F | 1425.89 ± 290.77 | 40.17 ± 8.22 | 8.26 ± 2.08 |

All values are ug/mL homogenate normalized to protein content; mean ± SD, n = 4-11 per group.
Values are non-significant (One Way ANOVA vs. Wt sex-matched group).

Rescue of glycogen storage in brain and muscle in Gaa^{-/-}/Tfrc^{hum} mice with AAV8 episomal liver depot anti-hTFRC scfv:GAA

[0752] We tested the anti-hTFRC scfv:GAA leads 12799, 12843, and 12847 in Pompe disease model mice to determine whether anti-hTFRC scfv:GAA rescued the glycogen storage phenotype (glycogen data in other data package). Here we also tested whether treatment with anti-TFRCscfv:GAA leads altered iron homeostasis (Tables 30, 31, and 32). We found that 4-week treatment did not affect iron homeostasis with any of the leads.

TABLE 30
Serum iron markers in Gaa^{-/-}/Tfrc^{hum} mice treated
with AAV8 episomal liver depot anti-hTFRC scfv:GAA

| | Serum iron | Serum TIBC | Serum Hepcidin |
|---|---|---|---|
| Treatment group | ug/dL | ug/dL | ng/mL |
| Wt Untreated | 203.83 ± 29.49 | 334.33 ± 17.83 | 265.89 ± 60.71 |
| Gaa^{-/-} | 196.50 ± 25.15 | 326.50 ± 34.39 | 329.19 ± 124.11 |
| Untreated | | | |
| Gaa^{-/-} | 188.50 ± 32.83 | 319.14 ± 28.20 | 341.25 ± 104.87 |
| 12799scfv:hGAA | | | |
| Gaa^{-/-} | 163.63 ± 28.27 | 275.88 ± 65.67 | 298.47 ± 104.60 |
| 12843scfv:hGAA | | | |
| Gaa^{-/-} | 159.29 ± 19.09 | 323.00 ± 24.82 | 387.47 ± 69.56 |
| 12847scfv:hGAA | | | |

All values are mean ± SD, n = 5-8 per group.
All values are non-significant (One Way ANOVA)

TABLE 31
Tissue iron quantification in Gaa^{-/-}/Tfrc^{hum} mice treated
with AAV8 episomal liver depot anti-hTFRC scfv:GAA

| Treatment group | Liver | Heart | Spleen |
|---|---|---|---|
| Wt Untreated | 228.12 ± 37.65 | 349.78 ± 27.98 | 893.68 ± 216.93 |
| Gaa^{-/-} | 260.59 ± 49.54 | 355.82 ± 48.43 | 1258.57 ± 600.35 |
| Untreated | | | |
| Gaa^{-/-} | 285.07 ± 67.17 | 350.44 ± 51.70 | 1251.36 ± 628.45 |
| 12799scfv:hGAA | | | |
| Gaa^{-/-} | 279.64 ± 41.89 | 360.78 ± 37.34 | 906.81 ± 280.82 |
| 12843scfv:hGAA | | | |
| Gaa^{-/-} | 336.33 ± 85.74 | 391.67 ± 58.36 | 1773.74 ± 374.26 |
| 12847scfv:hGAA | | | |

All values are ug/g dry tissue, mean ± SD, n = 5-8 per group.
All values are non-significant (One Way ANOVA).

TABLE 32
Transferrin protein in Gaa^{-/-}/Tfrc^{hum} mice treated with
AAV8 episomal liver depot anti-hTFRC scfv:GAA (ELISA)

| Treatment group | Liver | Spleen | Cerebrum |
|---|---|---|---|
| Wt Untreated | 19.82 ± 4.73 | 3.17 ± 1.46 | 10.69 ± 1.05 |
| Gaa^{-/-} Untreated | 14.71 ± 7.37 | 6.36 ± 2.59 | 12.54 ± 2.07 |
| Gaa^{-/-} 12799scfv:hGAA | 16.66 ± 6.99 | 5.87 ± 2.48 | 10.34 ± 1.49 |
| Gaa^{-/-} 12843scfv:hGAA | 14.16 ± 5.93 | 5.67 ± 1.95 | 11.19 ± 2.56 |
| Gaa^{-/-} 12847scfv:hGAA | 13.81 ± 3.04 | 5.70 ± 1.30 | 13.72 ± 1.87 |

All values are ug/mL homogenate normalized to protein content; mean ± SD, n = 5-8 per group.
Values are non-significant (One Way ANOVA vs. Gaa^{-/-} Untreated group).

### Example 8. Insertion Anti-hTFRC:GAA Gene Therapy in Mice

### mAb Clone IDs

[0753] H1H12847B in scfv:GAA format (REGN16826)
[0754] 12450NVH in scfv:GAA format (comparator, REGN5534)
   Insertion of Anti-hTFRC 12847Scfv:GAA in Gaa^{-/-}/Tfrch^{hum/hum} Mice

[0755] We tested our lead anti-hTFRC 12847scfv:GAA in Pompe disease model mice by albumin insertion to determine whether we could replicate the results we saw with episomal AAV8 liver depot expression. Albumin insertion of 12847scfv:GAA delivered mature hGAA protein to the brain and muscle, and rescued the glycogen storage phenotype in Gaa^{-/-}/Tfrc^{hum/hum} mice. These data were produced with the native 12847scfv:GAA sequence that is not optimized.

[0756] We compared 12847scfv:GAA to the muscle-targeted anti-hCD63scfv:GAA in Gaa^{-/-}/Cd63^{hum} mice.

### AAV Production

[0757] A promoterless AAV genome plasmid was created with the 12847scfv:GAA sequence and the mouse albumin exon 1 splice acceptor site at the 3′ end. Recombinant AAV8 (AAV2/8) was produced in HEK293 cells. Cells were transfected with three plasmids encoding adenovirus helper genes, AAV8 rep and cap genes, and recombinant AAV genomes containing transgenes flanked by AAV2 inverted terminal repeats (ITRs). On day 5, cells and medium were collected, centrifuged, and processed for AAV purification. Cell pellets were lysed by freeze-thaw and cleared by centrifugation. Processed cell lysates and medium were overlaid onto iodixanol gradients columns and centrifuged in an ultracentrifuge. Virus fractions were removed from the interface between the 40% and 60% iodixanol solutions and exchanged into 1×PBS with desalting columns. AAV vg were quantified by ddPCR.

In Vivo CRISPR/Cas9 Insertion into the Albumin Locus

[0758] Three month old Gaa^{-/-}/Tfrc^{hum/hum} mice were dosed via tail vein injection with 3e12 vg/kg AAV8 12847scfv:GAA and 3 mg/kg LNP gRNA/Cas9 mRNA diluted in PBS+0.001% F-68 Pluronic. Mice were sacrificed 3 weeks post injection. Negative control mice received insertion AAV8 without LNP. Positive control mice were dosed with 4e11 vg/kg episomal liver depot AAV8 12847scfv:GAA under the TTR promoter (phenotype rescue data previously shown). Tissues were dissected from mice immediately after sacrifice by CO₂ asphyxiation, snap frozen in liquid nitrogen, and stored at −80° C. Blood was collected from mice by cardiac puncture immediately following CO₂ asphyxiation and serum was separated using serum separator tubes (BD Biosciences, 365967).

TABLE 33
Treatment groups and controls

| | Geno- | |
|---|---|---|
| Treatment group | type | Function |
| Wt Untreated | Tfrc^{hum} | Normal untreated mouse control |
| Gaa^{-/-} untreated | Gaa^{-/-}/ | Untreated Pompe disease mouse |
| | Tfrc^{hum} | |
| Gaa^{-/-} insertion | Gaa^{-/-}/ | Negative control for insertion |
| AAV only | Tfrc^{hum} | (no Cas9/gRNA delivered) |
| Gaa^{-/-} episomal | Gaa^{-/-}/ | Positive control, previously |
| AAV8 TTR | Tfrc^{hum} | shown rescue of glycogen storage |
| 12847scfv:hGAA | | phenotype |
| Gaa^{-/-} insertion | Gaa^{-/-}/ | Experimental insertion group |
| 12847scfv:hGAA | Tfrc^{hum} | |
| Gaa^{-/-} untreated | Gaa^{-/-}/ | Untreated Pompe disease mouse |
| | Cd63^{hum} | (CD63 humanized) |
| Gaa^{-/-} insertion | Ga^{-/-}/ | Negative control for BBB-crossing |
| anti-CD63scfv:hGAA | Cd63^{hum} | (muscle targeted) |

### Western Blot: (Table 34, FIG. 8)

[0759] Tissue lysates were prepared by lysis in RIPA buffer with protease inhibitors (1861282, Thermo Fisher, Waltham, MA, USA). Tissue lysates were homogenized with a bead homogenizer (FastPrep5, MP Biomedicals, Santa Ana, CA, USA). Cells or tissue lysates were run on SDS-PAGE gels using the Novex system (LifeTech Thermo, XPO4200BOX, LC2675, LC3675, LC2676). Gels were transferred to low-fluorescence polyvinylidene fluoridev (PVDF) membrane (IPFLO7810, LI-COR, Lincoln, NE, USA) and stained with Revert 700 Total Protein Stain (TPS; 926-11010 LI-COR, Lincoln, NE, USA), followed by blocking with Odyssey blocking buffer (927-500000, LI-COR, Lincoln, NE, USA) in Tris buffer saline with 0.1% Tween 20 and staining with antibodies against GAA (ab137068, Abcam, Cambridge, MA, USA), or anti-GAPDH (ab9484, Abcam, Cambridge, MA, USA) and the appropriate secondary (926-32213 or 925-68070, LI-COR, Lincoln, NE, USA). Blots were imaged with a LI-COR Odyssey CLx.

[0760] Protein band intensity was quantified in LI-COR Image Studio software. The quantification of the mature 77 kDa GAA band for each sample was determined by normalizing to the lane's TPS signal (loading control).

### Glycogen Quantification: (Table 35, FIG. 9)

[0761] Tissues were dissected from mice immediately after sacrifice by CO₂ asphyxiation, snap frozen in liquid nitrogen, and stored at −80° C. Tissues were lysed on a benchtop homogenizer with stainless steel beads in distilled water for glycogen measurements or RIPA buffer for protein analyses. Glycogen analysis lysates were boiled and centrifuged to clear debris. Glycogen measurements were performed fluorometrically with a commercial kit according to manufacturer's instructions (K646, BioVision, Milpitas, CA, USA).

TABLE 34
Quantification of hGAA protein in tissues of Gaa^{-/-}/
Tfrc^{hum/hum} mice treated with insertion anti-hTFRC 12847scfv:hGAA

| | Liver | Serum | Cerebrum | Quadricep |
|---|---|---|---|---|
| | total | total | mature | mature |
| Treatment group | hGAA | hGAA | hGAA | hGAA |
| Gaa^{-/-} insertion AAV only negative control | 0.02 ± 0.003 | 0.03 ± 0.02 | 0.002 ± 0.001 | 0.006 ± 0.002 |
| Gaa^{-/-} episomal AAV8 TTR 12847scfv:hGAA | 2.35 ± 0.72 | 3.65 ± 2.09 | 0.49 ± 0.20^{§§} | 0.148 ± 0.043^{§§} |
| Gaa^{-/-} insertion 12847scfv:hGAA | 4.31 ± 0.87* | 3.47 ± 2.37 | 0.57 ± 0.26^{§§} | 0.141 ± 0.062^{§§} |
| Gaa^{-/-} insertion anti-CD63scfv:hGAA | 2.67 ± 1.04* | 0.93 ± 0.55* | 0.01 ± 0.003 | 0.060 ± 0.037 |

All values are arbitrary units, mean ± SD, n = 3-8 per group.
One Way ANOVA
*p < 0.05 vs. Gaa^{-/-} episomal AAV8 TTR 12847scfv:GAA group;
^{§§}p < 0.001 vs. AAV only negative control group.

TABLE 35
Quantification of glycogen in tissues of Gaa^{-/-}/Tfrc^{hum/hum}
mice treated with insertion anti-hTFRC 12847scfv:hGAA

| Treatment group | Cerebrum | Quadricep |
|---|---|---|
| Wt untreated | 0.10 ± 0.07 | 0.37 ± 0.13 |
| Gaa^{-/-}/Tfrc^{hum} untreated (Tfrc^{hum}) | 2.76 ± 0.41 | 12.75 ± 1.88 |
| Gaa^{-/-}/Tfrc^{hum} insertion AAV only | 2.17 ± 0.40* | 10.64 ± 2.56 |
| Gaa^{-/-}/Tfrc^{hum} episomal AAV8 TTR 12847scfv:hGAA | 0.13 ± 0.03***^{§} | 2.44 ± 2.21***^{§} |
| Gaa^{-/-}/Tfrc^{hum} insertion 12847scfv:hGAA | 0.16 ± 0.05***^{§} | 1.67 ± 0.76***^{§} |
| Gaa^{-/-}/Cd63^{hum} untreated | 2.34 ± 0.30 | 11.91 ± 1.01 |
| Gaa^{-/-}/Cd63^{hum} insertion anti-CD63scfv:hGAA | 1.71 ± 0.20* | 4.06 ± 0.13** |

All values are glycogen ug/mg tissue, mean ± SD, n = 3-8 per group.
One Way ANOVA
*p < 0.01 vs. Gaa^{-/-}/Cd63^{hum} untreated group;
**p < 0.001 vs. Gaa^{-/-}/Cd63^{hum} untreated group;
***p < 0.0001 vs. Gaa^{-/-}/Tfrc^{hum/hum} untreated group;
^{§}non-significant vs. Wt untreated group.

### Example 9. Anti-hTFRC:GAA Gene Insertion in Cynomolgus Monkeys

### mAb Clone IDs

[0762] H1H12847B in scfv:GAA format (REGN16826)
[0763] 12450NVH in scfv:GAA format (comparator, REGN5534)

### Insertion of Anti-hTFRC 12847Scfv:GAA in Cynomolgus Monkeys

[0764] We tested our lead anti-hTFRC 12847scfv:GAA in cynomolgus monkeys by albumin insertion to determine whether we could replicate the results we saw in mice. We compared 12847scfv:GAA to the muscle-targeted anti-hCD63scfv:GAA in cynomolgus monkeys. As shown in FIGS. 10-11, serum GAA activity corresponded to serum GAA protein levels. As shown in FIG. 11, albumin insertion of 12847scfv:GAA delivered mature hGAA protein to the brain (frontal cortex) and muscle (quadricep).

[0765] Albumin insertion of anti-hCD63scfv:GAA or 12847scfv:GAA resulted in similar serum GAA levels with two different gRNAs, regardless of what gRNA was used (data not shown). Insertion did not negatively affect serum iron panel or creatinine (data not shown).

### AAV Production

[0766] A promoterless AAV genome plasmid was created with the 12847scfv:GAA sequence and the mouse albumin exon 1 splice acceptor site at the 3′ end. Recombinant AAV8 (AAV2/8) was produced in HEK293 cells. Cells were transfected with three plasmids encoding adenovirus helper genes, AAV8 rep and cap genes, and recombinant AAV genomes containing transgenes flanked by AAV2 inverted terminal repeats (ITRs). On day 5, cells and medium were collected, centrifuged, and processed for AAV purification. Cell pellets were lysed by freeze-thaw and cleared by centrifugation. Processed cell lysates and medium were overlaid onto iodixanol gradients columns and centrifuged in an ultracentrifuge. Virus fractions were removed from the interface between the 40% and 60% iodixanol solutions and exchanged into 1×PBS with desalting columns. AAV vg were quantified by ddPCR.

In Vivo CRISPR1Cas9 Insertion into the Albumin Locus

[0767] Cynomolgus monkeys age 2-3 years were dosed intravenously with 1.5e13 vg/kg AAV8 12847scfv:GAA (or anti-CD63scfv:GAA) and 3 mg/kg LNP gRNA/Cas9 mRNA. Negative control monkeys received insertion AAV8 without LNP or vehicle control only. Serum and flash-frozen tissues were collected 90 days post-injection.

### GAA Activity in Serum: (FIG. 10)

[0768] Serum was collected prior to dosing and at indicated timepoints post-injection. GAA activity in the serum was quantified using Lysosomal alpha-Glucosidase Activity Assay Kit (Abcam ab252887). Serum GAA activity in CD63scfv:GAA and 12847scfv:GAA treated animals was above the vehicle controls and activity was similar between the treatment groups. Serum GAA activity corresponded with liver GAA protein expression and serum GAA protein levels (FIG. 11).

### Western Blot: (FIG. 11)

[0769] Tissue lysates were prepared by lysis in RIPA buffer with protease inhibitors (1861282, Thermo Fisher, Waltham, MA, USA). Tissue lysates were homogenized with a bead homogenizer (FastPrep5, MP Biomedicals, Santa Ana, CA, USA). Cells or tissue lysates were run on SDS-PAGE gels using the Novex system (LifeTech Thermo, XP04200BOX, LC2675, LC3675, LC2676). Gels were transferred to low-fluorescence polyvinylidene fluoridev (PVDF) membrane (IPFL07810, LI-COR, Lincoln, NE, USA) and stained with Revert 700 Total Protein Stain (TPS; 926-11010 LI-COR, Lincoln, NE, USA), followed by blocking with Odyssey blocking buffer (927-500000, LI-COR, Lincoln, NE, USA) in Tris buffer saline with 0.1% Tween 20 and staining with antibodies against GAA (ab137068, Abcam, Cambridge, MA, USA), or anti-GAPDH (ab9484, Abcam, Cambridge, MA, USA) and the appropriate secondary (926-32213 or 925-68070, LI-COR, Lincoln, NE, USA). Blots were imaged with a LI-COR Odyssey CLx.

[0770] Protein band intensity was quantified in LI-COR Image Studio software. The quantification of the mature 77 kDa GAA band for each sample was determined by normalizing to the lane's TPS signal (loading control).

### Example 10. Optimized Anti-TfR:GAA DNA Templates

[0771] Optimized anti-TfR:GAA templates were designed and generated. To select a development cantidate, several versions of the four cantidate anti-TfR:GAA insertion templates were generated in which the nucleotide sequence encoding the anti-TfR:GAA is modified (e.g., by depleting CpGs). Tables 36 and 37 list the different versions of anti-TfR:GAA inserts designed. Each of the anti-TfR:GAA inserts in Table 37 use the optimized GAA sequence set forth in SEQ ID NO: 649.

TABLE 36
Anti-TfR:GAA Inserts for Insertion Cassettes.

| Anti-TfR:GAA Insert | CpGs | SEQ ID NO (optimized GAA) |
|---|---|---|
| 12799 - DC | 0 | 651 |
| 12799 - GS | 0 | 652 |
| 12799 - 1^{st} generation | 160 | 648 |
| 12839 - DC | 0 | 653 |
| 12839 - GS | 0 | 654 |
| 12839 - 1^{st} generation | 163 | 648 |
| 12843 - DC | 0 | 655 |
| 12843 - GS | 0 | 656 |
| 12843 - 1^{st} generation | 160 | 648 |
| 12847 - DC | 0 | 657 |
| 12847 - GS | 0 | 658 |
| 12847 - 1^{st} generation | 160 | 648 |

TABLE 37
Anti-TfR:GAA Inserts for Insertion Cassettes.

| Anti-TfR:GAA Insert | CpGs in Transgene | SEQ ID NO |
|---|---|---|
| 12799 1^{st} generation | 160 | 659 |
| 12799 GA 0 | 0 | 663 |
| 12799 GS 0 | 0 | 664 |
| 12799 GS 0v2 | 0 | 665 |
| 12843 1^{st} generation | 160 | 661 |
| 12843 GA 0 | 0 | 666 |
| 12843 GS 0 | 0 | 667 |
| 12843 GS 0v2 | 0 | 668 |
| 12847 1^{st} generation | 160 | 662 |
| 12847 GA 0 | 0 | 669 |
| 12847 GS 0 | 0 | 670 |
| 12847 GS 0v2 | 0 | 671 |

[0772] Peripheral blood mononuclear cells (PBMCs) are isolated from human blood. Plasmacytoid dendritic cells (pDCs) are enriched and combined with pBMCs (1e4 pDCs+1e5 PBMCs per well). The cells are incubated for 16-18 hours with AAV or control CpG-oligodeoxynucleotides (ODNs). The supernatants are harvested, and an IFNα ELISA is performed. This assay assesses whether CpG-depleted anti-TfR:GAA sequences exhibit reduced IFN—I responses in a primary human plasmacytoid DC-based assay as compared to non-CpG-depleted sequences.

[0773] Activity of the various 12847 optimized anti-TfR:GAA templates (SEQ ID NOS: 675-678 or 669-671 (coding sequences)) and 12843 optimized anti-TfR:GAA templates (SEQ ID NOS: 672-674 or 666-668 (coding sequences)) was tested in a primary human hepatocyte assay. AAV templates were packaged into AAV2 viruses. Primary human hepatocytes were grown in 96-well plates and administered the AAV containing the template DNA and LNP-g9860 at fixed MOI (6e4) with LNP dose titration. Supernatants were collected 7 days post-dosing and stored at −80 degrees Celsius. Supernatants were thawed and GAA activity in the supernatants was measured using a 4-methylumbelliferone-based fluorometric assay (K690, BioVision, Milpitas, CA, USA) as a measurement of amount of enzymatically active GAA produced and secreted from the cells. As shown in FIGS. 19A-19B, all CpG-depleted anti-TfR:GAA templates exhibited increased GAA activity in primary human hepatocyte supernatant compared to the native anti-TfR:GAA templates.

[0774] Activity of the optimized templates is tested in a primary human hepatocyte assay. AAV templates are packaged into AAV2 viruses. Primary human hepatocytes are grown in 96-well plates and administered the AAV containing the template DNA and LNP-g9860 at fixed LNP concentration with AAV dose titration. Supernatants are collected 7 days post-dosing and stored at −80 degrees Celsius. Supernatants are thawed and GAA activity in the supernatants is measured using a 4-methylumbelliferone-based fluorometric assay (K690, BioVision, Milpitas, CA, USA) as a measurement of amount of enzymatically active GAA produced and secreted from the cells.

[0775] Activity of the 12847 scFv:GAA 0 CpG v0 optimized template (SEQ ID NO: 676 or 669 (coding sequence)) was then validated in the PD mouse model, Gaa^{-/-};Tfrc^{hu/hu} as described in Example 6. Three-month old mice (Gaa^{-/-};Tfrc^{hu/hu} mice and Gaa^{-/-};CD63^{hu/hu} mice) were dosed intravenously with 3 mg/kg LNP-g9860 and 3ev12 vg/kg AAV8 anti-TfR:GAA templates (native or 12847 0 CpG v0) and optimized anti-CD63:GAA template (GA 0 CpG anti-CD63:GAA template; SEQ ID NO: 679 or 650 (coding sequence)), respectively. Western blots for GAA (scFv:GAA and mature GAA) were done as in Example 6 and confirmed delivery of GAA to the brain (cerebrum) following albumin insertion of the native anti-TfR:GAA template or the 0 CpG anti-TfR:GAA template (FIG. 20A). Glycogen quantification in cerebrum, quadriceps, diaphragm, and heart was also done as in Example 6 and confirmed that albumin insertion of the 0 CpG anti-TfR:GAA templates retained TfR binding and GAA activity in vivo and that the CpG depleted sequence was as effective as the native sequence at rescuing the glycogen storage phenotype in Gaa^{-/-};Tfrc^{hu/hu} mice (FIG. 20B and Table 38).

TABLE 38
Quantification of glycogen in tissues of Gaa^{-/-}/Tfrc^{hum}
mice treated with anti-hTfRscfv:hGAA insertion templates.

| Treatment group | Cerebrum | Diaphragm | Heart | Quadricep |
|---|---|---|---|---|
| hTFRC Wt | 0.256 ± 0.175* | 2.44 ± 1.97* | 0.042 ± 0.022* | 0.724 ± 0.611* |
| hTFRC Gaa−/− Untreated | 2.56 ± 0.237 | 17.54 ± 1.72 | 34.56 ± 6.36 | 7.96 ± 1.38 |
| hTFRC Gaa^{-/-} 12847:GAA native | 0.076 ± 0.022* | 1.30 ± 0.973* | 0.405 ± 0.351* | 1.48 ± 0.867* |
| hTFRC Gaa^{-/-}12847:GAA 0 CpG | 0.114 ± 0.049* | 1.55 ± 1.60* | 0.35 ± .372* | 1.21 ± 0.821* |
| hCD63 Gaa^{-/-} Untreated | 2.39 ± 0.432 | 18.30 ± 2.62 | 30.88 ± 2.451 | 7.37 ± 1.134 |
| hCD63 Gaa^{-/-} CD63:GAA 0 CpG | 1.68 ± 0.220* | 0.544 ± 0.294* | 0.0634 ± 0.045* | 0.803 ± 0.297* |

All values are glycogen μg/mg tissue, mean ± SD, n = 5-8 per group.
One Way ANOVA
*p < 0.0001 vs. hTFRC Gaa^{-/-} Untreated group.

### Example 11. Epitope Mapping for Transferrin (TfR) Antibodies

[0776] Hydrogen-Deuterium Exchange Mass Spectrometry (HDX-MS) was performed to delineate regions in mouse and human Transferrin (m/hTfR) involved in binding of anti-Transferrin Receptor (TfR) antibodies. The anti-TfR monoclonal antibodies tested are described in Table 39. The reagents used and corresponding lot numbers are set forth in Table 40.

TABLE 39
Monoclonal Antibody Clones Tested

| REGN# | AbPID | Lot # |
|---|---|---|
| REGN17507 | H1H12798B | L1 |
| REGN17508 | H1H12799B | L1 |
| REGN17509 | H1H12835B | L1 |
| REGN17510 | H1H12839B | L1 |
| REGN17511 | H1H12841B | L1 |
| REGN17512 | H1H12843B | L1 |
| REGN17513 | H1H12845B | L1 |
| REGN17514 | H1H12847B | L1 |
| REGN17515 | H1H12848B | L1 |
| REGN17516 | H1H12850B | L1 |
| REGN17517 | H1H31874B | L1 |

TABLE 40
Reagents Used and Lot Numbers

| REGN# | Lot # | Description |
|---|---|---|
| REGN2120 | 03-121015 | hTfR(C89-F763).mmh |
| REGN2431 | L1 | hmm.hTfR(C89-F763) |

[0777] A general description of the HDX-MS method is set forth in, e.g., Ehring (1999) Analytical Biochemistry 267(2):252-259; and Engen and Smith (2001) Anal. Chem. 73:256A-265A. The experiment was performed on a customized HDX automation system (NovaBioAssays, MA) coupled to a Q Exactive HF mass spectrometer (Thermno Fisher Scientific, MA).

[0778] PBS-D₂O buffer was prepared by dissolving one PBS tablet in 100 mL 99.9% D₂O to form solution of 10 mM sodium phosphate, 137 mM NaCl, 3 mM KCl, pD 7.0 (equivalent to pH 7.4 at 25° C.). To initiate deuterium exchange, 10 μL of protein sample (hTfR alone, or hTfR in mixture with either of the monoclonal mAbs listed above, see, e.g., Table 39) was diluted with 90 μL PBS-D₂O buffer. After 5 minutes or 10 minutes, deuterium exchange was quenched by adding 100 μL quenching buffer (0.5 M TCEP, 4 M guanidine hydrochloride, pH 2.08) followed by 90 second incubation at 20° C. The quenched samples were digested by online pepsin/protease XIII column (NovaBioAssays, MA) at room temperature with 100 μL/min 0.1% formic acid in water. Peptic peptides were trapped by an ACQUITY UPLC Peptide BEH C18 VanGuard Pre-column (2.1×5 mm, Waters, MA) and further separated by an ACQUITY UPLC Peptide BEH C18 column (2.1×50 mm, Waters, MA) at −5° C., using 10-minute or 15-minute gradients with 0.1% formic acid in water and 0.1% formic acid in acetonitrile as mobile phases at 200 μL/min. Eluted peptides were analyzed by the mass spectrometer in LC-MS/MS or LC-MS mode.

[0779] A set of non-deuterated samples was prepared in PBS—H₂O buffer and analyzed with the method described above to identify peptide sequences and determine peptide masses without deuterium exchange. The LC-MS/MS data of non-deuterated samples were searched against a database containing sequences of hTfR, pepsin and protease XIII using the Byonic search engine (Protein Metrics, CA) with parameters for non-specific enzymatic digestion. The identified peptide list was then imported into the HDExaminer software (Sierra Analytics, CA) together with LC-MS data from all deuterated samples to calculate the deuterium uptake percentage (D %) of individual peptides from hTfR. Differences in deuterium uptake were calculated as ΔD %=D % of hTfR-mAb−D % of hTfR. Differences were considered significant if ΔD %<−5% (equivalent to |ΔD|>5% and ΔD %<0, averaged from 2 replicates). Mass spectra of peptides showing significant differences were examined manually to ensure that correct isotopic patterns were used for D % calculations by the software.

[0780] Two TfR protein constructs were used in HDX-MS experiments by reason of reagent availability and antibody specificity: hTfR(C89-F763).mmh, and hmm.hTfR(C89-F763). HDX data were obtained on 88%-95% of amino acids in hTfR with mmh tag. The numerical range provided before each amino acid sequence in the list below indicates the amino acid (aa) residue positions in hTfR which are protected by the indicated antibody. These amino acid residue positions are indicative of antibody binding sites on hTfR and does not provide residue-level contacts between them. Due to the nature of HDX-MS technique, the regions obtained by HDX-MS may be larger or smaller than actual contacts determined by high-resolution structural studies such as X-ray crystallography and cryogenic electron microscopy methods.

REGN17507 (H1H12798B) protects the following
regions in hTfR:
146-167
(SEQ ID NO: 704)
LLNENSYVPREAGSQKDENLAL;
281-295
(SEQ ID NO: 705)
IYMDQTKFPIVNAEL;
and
572-576
(SEQ ID NO: 706)
TYKEL.
REGN17508 (H1H12799B) protects the following
regions in hTfR:
128-146
(SEQ ID NO: 707)
KRKLSEKLDSTDFTGTIKL;
503-522
(SEQ ID NO: 708)
YTLIEKTMQNVKHPVTGQFL;
and
576-592
(SEQ ID NO: 709)
LIERIPELNKVARAAAE.
REGN17509 (H1H12835B) protects the following
region in hTfR:
147-165
(SEQ ID NO: 710)
LNENSYVPREAGSQKDENL.
REGN17510 (H1H12839B) protects the following
region in hTfR:
238-246
(SEQ ID NO: 711)
GTKKDFEDL.
REGN17511 (H1H12841B) protects the following
region in hTfR:
199-224
(SEQ ID NO: 712)
SVIIVDKNGRLVYLVENPGGYVAYSK.
REGN17512 (H1H12843B) protects the following
regions in hTfR:
146-164
(SEQ ID NO: 713)
LLNENSYVPREAGSQKDEN;
284-295
(SEQ ID NO: 714)
DQTKFPIVNAEL;
and
572-585
(SEQ ID NO: 715)
TYKELIERIPELNK.
REGN17513 (H1H12845B) protects the following
region in hTfR:
199-222
(SEQ ID NO: 716)
SVIIVDKNGRLVYLVENPGGYVAY.
REGN17514 (H1H12847B) protects the following
regions in hTfR:
146-164
(SEQ ID NO: 713)
LLNENSYVPREAGSQKDEN;
and
572-585
(SEQ ID NO: 715)
TYKELIERIPELNK.
REGN17515 (H1H12848B) protects the following
regions in hTfR:
281-295
(SEQ ID NO: 705)
IYMDQTKFPIVNAEL;
and
346-365
(SEQ ID NO: 717)
FGNMEGDCPSDWKTDSTCRM.
REGN17516 (H1H12850B) protects the following
regions in hTfR:
146-167
(SEQ ID NO: 704)
LLNENSYVPREAGSQKDENLAL;
212-232
(SEQ ID NO: 719)
LVENPGGYVAYSKAATVTGKL;
281-297
(SEQ ID NO: 720)
IYMDQTKFPIVNAELSF;
337-345
(SEQ ID NO: 721)
ISRAAAEKL;
366-383
(SEQ ID NO: 722)
VTSESKNVKLTVSNVLKE;
and
557-572
(SEQ ID NO: 723)
FCEDTDYPYLGTTMDT
REGN17517 (H1H31874B) protects the following
region in hTfR:
243-246
(SEQ ID NO: 718)
FEDL.

[0781] The minimal amino acid sequence in hTfR which is protected by the above-listed anti-TfR antibodies (i.e., the minimal epitope sequence), numerical range indicating the amino acid (aa) residue positions in hTfR which are protected each antibody, as well as the conformational or linear nature of each minimal epitope are described in Table 41. Each of the minimal epitopes is bound by its corresponding antibody at one or more amino acid residues within the minimal epitope sequence.

TABLE 41
Minimal epitope sequences in hTfR protected by
anti-TfR antibodies.

| | | | Amino | | |
|---|---|---|---|---|---|
| | Epi- | | acid | Amino | SEQ |
| Antibody | tope | | residue | acid | ID |
| ID | No. | Class | positions | sequence | NO |
| REGN17507 | 1 | conforma- | 146-149 | LLNE | 796 |
| (H1H12798B) | | tional | | | |
| REGN17507 | 2 | conforma- | 572-576 | TYKEL | 706 |
| (H1H12798B) | | tional | | | |
| REGN17508 | 1 | conforma- | 136-143 | DSTDFTGT | 797 |
| (H1H12799B) | | tional | | | |
| REGN17508 | 2 | conforma- | 513-521 | VKHPVTGQF | 798 |
| (H1H12799B) | | tional | | | |
| REGN17508 | 3 | conforma- | 577-583 | IERIPEL | 799 |
| (H1H12799B) | | tional | | | |
| REGN17509 | 1 | linear | 147-164 | LNENSYVPRE | 800 |
| (H1H12835B) | | | | AGSQKDEN | |
| REGN17510 | 1 | linear | 243-246 | FEDL | 718 |
| (H1H12839B) | | | | | |
| REGN17511 | 1 | linear | 202-209 | IVDKNGRL | 801 |
| (H1H12841B) | | | | | |
| REGN17512 | 1 | conforma- | 146-149 | LLNE | 796 |
| (H1H12843B) | | tional | | | |
| REGN17512 | 2 | conforma- | 572-576 | TYKEL | 706 |
| (H1H12843B) | | tional | | | |
| REGN17513 | 1 | linear | 202-211 | IVDKNGRLVY | 802 |
| (H1H12845B) | | | | | |
| REGN17514 | 1 | conforma- | 146-149 | LLNE | 796 |
| (H1H12847B) | | tional | | | |
| REGN17514 | 2 | conforma- | 572-576 | TYKEL | 706 |
| (H1H12847B) | | tional | | | |
| REGN17515 | 1 | linear | 284-288 | DQTKF | 803 |
| (H1H12848B) | | | | | |
| REGN17516 | 1 | conforma- | 212-218 | LVENPGGY | 804 |
| (H1H12850B) | | tional | | | |
| REGN17516 | 2 | conforma- | 289-297 | PIVNAELSF | 805 |
| (H1H12850B) | | tional | | | |
| REGN17516 | 3 | conforma- | 564-572 | PYLGTTMDT | 806 |
| (H1H12850B) | | tional | | | |
| REGN17517 | 1 | linear | 243-246 | FEDL | 718 |
| (H1H31874B) | | | | | |

[0782] The extracellular unit of hTfR is structurally categorized into three domains, the helical, protease-like and apical domains (PDB 1SUV).

[0783] Structural studies of TfR in complex with a variety of molecules that have identified TfR binding sites, including Mammarenavirus machupoense GP1 protein (PDB 3KAS), canine parvovirus (PDB 2NSU), human ferritin (PDB 6GSR), Plasmodium vivax Sal-1 PvRBP2b (PDB 6D04), human HFE protein (PDB 1DE4), human transferrin (PDB 1SUV), etc. FIG. 12 shows the interactions of the above-listed molecules superimposed on a single TfR molecule.

[0784] HDX protections for the antibodies tested in HDX-MS experiments can be assigned to 5 regions in TfR (PDB 1SUV) as depicted in FIG. 13.

[0785] Tabulated summaries of data of the present Example are described in Table 42 to Table 46. FIGS. 14-18 correspond to the tables below.

TABLE 42
Antibodies that show HDX protections in TfR
apical domain and overlap with Mammarenavirus
machupoense GP1, canine parvovirus, human
ferritin, and plasmodium vivax Sal-1 PvRBP2b
binding sites.

| | | | m/hTfR | |
|---|---|---|---|---|
| | | | residues | |
| | | | with | |
| | | | significant | |
| | | | changes in | Sequence |
| Antibody | REGN# | Antigen | deuterium % | coverage |
| H1H12841B | REGN17511 | hTfR.mmh | 199-224 | ~92.9% |
| | | | SVIIVDKNGRLVY | |
| | | | LVENPGGYVAYSK | |
| | | | (SEQ ID NO: | |
| | | | 712) | |
| H1H12845B | REGN17513 | hmm.hTfR | 199-222 | ~88.1% |
| | | | SVIIVDKNGRLVY | |
| | | | LVENPGGYVAY | |
| | | | (SEQ ID NO: | |
| | | | 716) | |

TABLE 43
Antibodies with HDX protections in TfR apical
domain that are not shared by other TfR
binding partners listed in Table 42.

| | | | m/hTfR | |
|---|---|---|---|---|
| | | | residues | |
| | | | with | |
| | | | significant | |
| | | | changes in | Sequence |
| Antibody | REGN# | Antigen | deuterium % | coverage |
| H1H31874B | REGN17517 | hTfR.mmh | 243-246 | ~92.9% |
| | | | FEDL | |
| | | | (SEQ ID | |
| | | | NO: 718) | |
| H1H12839B | REGN17510 | hmm.hTfR | 238-246 | ~88.3% |
| | | | GTKKDFEDL | |
| | | | (SEQ ID | |
| | | | NO: 711) | |

TABLE 44
Antibodies with HDX protections in TfR apical
domain that share binding sites with human
ferritin and plasmodium vivax Sal-1 PvRBP2b.

| | | | m/hTfR | |
|---|---|---|---|---|
| | | | residues | |
| | | | with | |
| | | | significant | |
| | | | changes in | Sequence |
| Antibody | REGN# | Antigen | deuterium % | coverage |
| H1H12848B | REGN17515 | hTfR.mmh | 281-295 | ~92.9% |
| | | | IYMDQTKFPIVN | |
| | | | AEL | |
| | | | (SEQ ID | |
| | | | NO: 705) | |
| | | | 346-365 | |
| | | | FGNMEGDCPSDW | |
| | | | KTDSTCRM | |
| | | | (SEQ ID | |
| | | | NO: 717) | |
| H1H12850B | REGN17516 | hTfR.mmh | 146-167 | ~92.9% |
| | | | LLNENSYVPREA | |
| | | | GSQKDENLAL | |
| | | | (SEQ ID | |
| | | | NO: 704) | |
| | | | 212-232 | |
| | | | LVENPGGYVAYS | |
| | | | KAATVTGKL | |
| | | | (SEQ ID | |
| | | | NO: 719) | |
| | | | 281-297 | |
| | | | IYMDQTKFPIVN | |
| | | | AELSF | |
| | | | (SEQ ID | |
| | | | NO: 720) | |
| | | | 337-345 | |
| | | | ISRAAAEKL | |
| | | | (SEQ ID | |
| | | | NO: 721) | |
| | | | 366-383 | |
| | | | VTSESKNVKLTV | |
| | | | SNVLKE | |
| | | | (SEQ ID | |
| | | | NO: 722) | |
| | | | 557-572 | |
| | | | FCEDTDYPYLGT | |
| | | | TMDT | |
| | | | (SEQ ID | |
| | | | NO: 723) | |

TABLE 45
Antibodies with HDX protections in TfR
protease-like domain and share binding
sites with plasmodium vivax Sal-1 PvRBP2b.

| | | | m/hTfR | |
|---|---|---|---|---|
| | | | residues | |
| | | | with | |
| | | | significant | |
| | | | changes in | Sequence |
| Antibody | REGN# | Antigen | deuterium % | coverage |
| H1H12798B | REGN17507 | hmm.hTfR | 146-167 | ~87.0% |
| | | | LLNENSYVPREA | |
| | | | GSQKDENLAL | |
| | | | (SEQ ID | |
| | | | NO: 704) | |
| | | | 281-295 | |
| | | | IYMDQTKFPIVN | |
| | | | AEL | |
| | | | (SEQ ID | |
| | | | NO: 705) | |
| | | | 572-576 | |
| | | | TYKEL | |
| | | | (SEQ ID | |
| | | | NO: 706) | |
| H1H12843B | REGN17512 | hmm.hTfR | 146-164 | ~88.3% |
| | | | LLNENSYVPREA | |
| | | | GSQKDEN | |
| | | | (SEQ ID | |
| | | | NO: 713) | |
| | | | 284-295 | |
| | | | DQTKFPIVNAEL | |
| | | | (SEQ ID | |
| | | | NO: 714) | |
| | | | 572-585 | |
| | | | TYKELIERIPEL | |
| | | | NK | |
| | | | (SEQ ID | |
| | | | NO: 715) | |
| H1H12847B | REGN17514 | hmm.hTfR | 146-164 | ~88.1% |
| | | | LLNENSYVPREA | |
| | | | GSQKDEN | |
| | | | (SEQ ID | |
| | | | NO: 713) | |
| | | | 572-585 | |
| | | | TYKELIERIPEL | |
| | | | NK | |
| | | | (SEQ ID | |
| | | | NO: 715) | |
| H1H12835B | REGN17509 | hTfR.mmh | 147-165 | ~92.9% |
| | | | LNENSYVPREAG | |
| | | | SQKDENL | |
| | | | (SEQ ID | |
| | | | NO: 710) | |

TABLE 46
Antibodies with HDX protections in TfR
protease-like domain. This region is not
utilized by other TfR interacting molecules
listed in Table 45.

| | | | m/hTfR | |
|---|---|---|---|---|
| | | | residues | |
| | | | with | |
| | | | significant | |
| | | | changes in | Sequence |
| Antibody | REGN# | Antigen | deuterium % | coverage |
| H1H12799B | REGN17508 | hmm.hTfR | 128-146 | ~88.7% |
| | | | KRKLSEKLDSTD | |
| | | | FTGTIKL | |
| | | | (SEQ ID | |
| | | | NO: 707) | |
| | | | 503-522 | |
| | | | YTLIEKTMQNVK | |
| | | | HPVTGQFL | |
| | | | (SEQ ID | |
| | | | NO: 708) | |
| | | | 576-592 | |
| | | | LIERIPELNKVA | |
| | | | RAAAE | |
| | | | (SEQ ID | |
| | | | NO: 709) | |

### REFERENCES

[0786] 1. Ehring (1999) Analytical Biochemistry 267(2):252-259
[0787] 2. Engen and Smith (2001) Anal. Chem. 73:256A-265A

### Example 12. Durable Alpha-Glucosidase (GAA) Expression after Insertion of Anti-CD63:GAA DNA Template in Neonatal Mice

[0788] We next engineered a DNA template for insertion of a nucleic encoding anti-CD63:GAA fusions in which the C-terminus of an anti-CD63 single-chain fragment variable (scFv) is fused to the N-terminus of GAA with a glycine-serine linker (described above). We tested the anti-CD63:GAA insertion template in a Pompe disease (PD) mouse model, Gaa^{-/-};Cd63^{hu/hu}, where Gaa was replaced by LacZ and the protein-coding region of the Cd63 locus was replaced with its human counterpart. Adult (2-month old) male and female Gaa^{-/-};Cd63^{hu/hu} mice (62.5% C57BL/6, 37.5% 129Sv) were dosed intravenously with the following: (1) 4e12 vg/kg recombinant AAV8 encoding anti-CD63:GAA (REGV042); or (2) 1 mg/kg LNP-g666 and 1.2e13 vg/kg recombinant AAV8 anti-CD63:GAA insertion template (REGV044). REGV042 is an episomal AAV that uses a hSerpinal enhancer and a mTTR promoter to give hepatocyte-specific expression of anti-CD63:GAA, which further includes a human albumin signal peptide. The anti-CD63:GAA coding sequences were identical in REGV042 and REGV044 and are set forth in SEQ ID NO: 734. Untreated Gaa^{-/-};Cd63^{hu/hu} mice and wild type mice were used as controls. Blood was collected and serum prepared at 7 days, 30 days, 2 months, 3 months, 6 months, and 10 months post-administration, and tissues were collected at 10 months post-administration. Anti-CD63:GAA serum levels were quantified using a plate-based sandwich ELISA that detects the scFv portion of the molecule. Anti-CD63:GAA purified protein was used as a protein standard for quantification. Data are shown in FIG. 21 and Tables 47-48. At 10 months post-administration, animals were sacrificed, and glycogen levels were quantified in muscle tissue lysates of the sacrificed animals. Tissues were dissected from mice immediately after sacrifice by CO₂ asphyxiation, snap frozen in liquid nitrogen, and stored at −80° C. Tissues were lysed on a benchtop homogenizer with stainless steel beads in distilled water for glycogen measurements or RIPA buffer for protein analyses. Glycogen analysis lysates were boiled and centrifuged to clear debris. Glycogen measurements were performed fluorometrically with a commercial kit according to manufacturer's instructions (K646, BioVision, Milpitas, CA, USA). As shown in FIG. 22 and Tables 49-51, glycogen was significantly reduced to near wild type levels in both the episomal group and the insertion group in heart, quadricep, and diaphragm in adult mice.

TABLE 47
Serum Levels of Anti-CD63:GAA in μg/mL in Insertion Adult Group.

| Months | M1 | M2 | M3 | M4 | M5 | F1 | F2 | F3 | F4 | F5 | F6 | F7 |
|---|---|---|---|---|---|---|---|---|---|---|---|---|
| 0.25 | 21.06 | 2.6 | 14.93 | 24.37 | 24.39 | 16.08 | 11.21 | 18.35 | 28.54 | 20.94 | | |
| 1 | 16.43 | 1.85 | 17.92 | 13.45 | 3.7 | 18.88 | 19.37 | 26.6 | 19.8 | 28.72 | 26.63 | 19.97 |
| 2 | 13.15 | 2.95 | 13.82 | 6.06 | 11.51 | 6.45 | 9.5 | 8.05 | 11.61 | 19.2 | 12.07 | 14.09 |
| 3 | 14.49 | 2.53 | 7.22 | 6.04 | 5.75 | 4.62 | 10.19 | 5.75 | 14.8 | 12.93 | 6.61 | 10.26 |
| 6 | 12.92 | 3.13 | 12.08 | 8.18 | 5.54 | 2.48 | 9.08 | 8 | 18.66 | 2.78 | 5.03 | 15.15 |
| 10 | 16.5 | 2 | 7.5 | 10.6 | 2.3 | | 2.4 | | | | | |

*Cells without data were due to lost samples post-collection.

TABLE 48
Serum Levels of Anti-CD63:GAA in μg/mL in Episomal Adult Group.

| Months | M1 | M2 | M3 | M4 | M5 | M6 | M7 | F1 | F2 | F3 | F4 | F5 |
|---|---|---|---|---|---|---|---|---|---|---|---|---|
| 0.25 | 62.13 | 52.18 | 47.7 | 53.55 | 4.9 | 4.85 | 2.92 | 11.55 | 0 | 0 | 8.37 | 0.6 |
| 1 | 43.85 | 48.12 | 40.68 | 49.22 | 14.41 | 15.74 | 2.21 | 19.18 | 0 | 1.09 | 4.57 | 2.25 |
| 2 | 43.68 | 30.59 | 29.79 | 35.37 | 7.88 | 6.71 | 1.67 | 11.27 | 0 | 0.51 | 0.54 | 0 |
| 3 | 51.86 | 47.18 | 38.41 | 50.98 | 5.05 | 10.89 | 1.54 | 3.26 | 0 | 0 | 0.19 | 0.6 |
| 6 | 42.49 | 40.95 | 44.62 | 44.2 | 4.42 | 4.03 | 1.93 | 0.35 | 0 | 0 | 0.17 | 0.17 |
| 10 | 20.9 | 17.9 | 18 | 13.1 | 5.2 | 4.9 | 1.2 | 0.1 | 0 | 0 | 0 | 0 |

TABLE 49
Glycogen Levels in Insertion Adult Group.

| | M1 | M2 | M3 | M4 | M5 | F1 | F2 | F3 | F4 | F5 | F6 | F7 |
|---|---|---|---|---|---|---|---|---|---|---|---|---|
| Heart | 0.02 | 0.02 | 0.02 | 0.01 | 0.22 | 0.02 | 0.02 | 0.19 | 0.04 | 0.02 | 0.04 | 0.02 |
| Quadricep | 0.43 | 3.24 | 0.47 | 0.79 | 2.12 | 0.5 | 2.32 | 0.82 | 1.06 | 3.45 | 0.83 | 0.89 |
| Diaphragm | 2.85 | 1.51 | 0.34 | 2.24 | 4.75 | 0.37 | 4.06 | 0.9 | 4.47 | 4.56 | 2.86 | 0.04 |
| Spinal Cord | 4.28 | 8.11 | 5.82 | 1.38 | 3.41 | 5.46 | 6.68 | 5.63 | 4 | 4.62 | 5.57 | 7.02 |

TABLE 50
Glycogen Levels in Episomal Adult Group.

| | M1 | M2 | M3 | M4 | M5 | M6 | M7 | F1 | F2 | F3 | F4 | F5 |
|---|---|---|---|---|---|---|---|---|---|---|---|---|
| Heart | 0.18 | 0.13 | 0.22 | 0.02 | 0.18 | 0.02 | 0 | 1.04 | 15.39 | 4.99 | 5.74 | 0.13 |
| Quadricep | 0.87 | 0.54 | 0.72 | 0.27 | 0.71 | 0.85 | 2.78 | 6.09 | 12.05 | 10.46 | 11.31 | 2.89 |
| Diaphragm | 2.39 | 1.62 | 3.41 | 1.22 | 2.13 | 0.32 | 0.75 | 6.41 | 9.94 | 9.7 | 8.58 | 2.89 |
| Spinal Cord | 0.3 | 2.63 | 3.37 | 3.19 | 2.96 | 5.99 | 6.1 | 4.66 | 6.46 | 7.9 | 8.15 | 7.67 |

TABLE 51
Glycogen Levels in Control Adult Groups.

| | Untreated Pompe mice (GAA−/−; CD63 hu/hu) | | | | Wild-type (GAA+/+ CD63hu/hu) | | | |
|---|---|---|---|---|---|---|---|---|
| | M1 | M2 | F1 | F2 | M1 | M2 | F1 | F2 |
| Heart | 51.59 | 44.11 | 46.31 | 38.79 | 0.12 | 0.85 | 1.57 | 0.02 |
| Quadricep | 21.63 | | | | 0 | 0.74 | 0 | 0 |
| Diaphragm | 20.55 | 19.89 | 19.29 | 22.63 | 0 | 0.7 | 0.42 | 0.02 |
| Spinal Cord | 9.05 | 3.5 | 7.17 | 7.78 | 0 | 0.77 | 0.96 | 0.05 |

*Cells without data were due to experimental error.

[0789] Similar experiments were then performed in which neonatal Gaa^{-/-};Cd63^{hu/hu} mice (62.5% C57BL/6, 37.5% 129Sv) were dosed intravenously at P1 with the following: (1) 8.2e12 vg/kg recombinant AAV8 encoding anti-CD63:GAA (REGV042); or (2) 4 mg/kg LNP-g666, and 8.2e12 vg/kg recombinant AAV8 anti-CD63:GAA insertion template (REGV044). Untreated Gaa^{-/-};Cd63^{hu/hu} mice and wild type mice were used as controls. Blood was collected and serum prepared at 7 days, 30 days, 2 months, 3 months, 4 months, 5 months, 6 months, 7 months, 8 months, 9 months, 12 months, 13 months, and 15 months, and tissues were collected at 3 months and 15 months post-administration. As shown in FIGS. 23A-23B and Tables 52-53, in contrast to what was observed when adult mice were dosed, the serum anti-CD63:GAA levels were stable over the 15-month time course in the insertion group, but the episomal group started out lower and dropped off to below the lower limit of quantification using the serum ELISA assay within 1 month when neonatal mice were dosed. Similarly, as shown in FIG. 24A and Table 54, glycogen storage at 3 months was normalized to wild type levels in heart, quadricep, gastrocnemius, and diaphragm in the insertion group, but not in the episomal group. Likewise, as shown in FIG. 24B and Table 55, glycogen storage at 15 months was normalized to wild type levels in heart, quadricep, gastrocnemius, and diaphragm in the insertion group, and glycogen storage was partially corrected in CNS tissues in the insertion group but not the episomal group.

TABLE 52
Serum Anti-CD63:GAA Levels (μg/mL) in Neonatal Mice with Insertion Group.

| | Insertion (AAV + LNP) | | | | | | | | | | | | | | | | | | |
|---|---|---|---|---|---|---|---|---|---|---|---|---|---|---|---|---|---|---|---|
| Months | * | * | ** | ** | ** | | | | | | | | ** | | | | * | * | * |
| 0.23 | 18.3 | 14.4 | 15.9 | 12.2 | 12.8 | 8.7 | 5.9 | 15.1 | 9.5 | 14.6 | 8.2 | 11.6 | 5.7 | 8.4 | 14 | 13.7 | 8.8 | 8.6 | 3.4 |
| 1 | 13.2 | 14.8 | 13.9 | 9 | 10.3 | 5.4 | 3.9 | 11.1 | 6.1 | 11.2 | 8 | 9.9 | 4.7 | 9.4 | 11.5 | 8.7 | 10.2 | 11.1 | 0 |
| 3 | 10.2 | 10.9 | | | | 3.5 | 2.3 | 10.3 | 5.8 | 7.2 | 6.9 | 8.2 | 2.7 | 7.9 | 14.7 | 5.5 | 7.2 | 6.2 | 2.8 |
| 4 | | | | | | 5.2 | 2.8 | 8.7 | 7.2 | 8.7 | 6.8 | 8.4 | | 7.4 | 14.5 | 6.8 | | | |
| 5 | | | | | | 7.1 | 4.1 | 12.1 | 6.6 | 10.2 | 8.1 | 9 | | 8.5 | 16.6 | 8.8 | | | |
| 6 | | | | | | 6.9 | 4.2 | 14.8 | 7 | 10.2 | 7 | 7.9 | | 9.2 | 13.1 | 8 | | | |
| 7 | | | | | | 8.9 | 4.9 | 17.5 | 11.2 | 10.4 | 9.9 | 10 | | 9.1 | 13.4 | 9.6 | | | |
| 8 | | | | | | 8.5 | 4.4 | 17 | 6 | 8.9 | 8.4 | 8.5 | | 8.1 | 12.5 | 9.3 | | | |
| 9 | | | | | | 5.9 | 3.1 | 10.7 | 5.2 | 25.4 | 7.5 | 5.9 | | 6.5 | 9.4 | 6.2 | | | |
| 12 | | | | | | 6.7 | 3.6 | 10.3 | 6.8 | 17.8 | 6.8 | 7.3 | | 6.7 | 9.7 | 5.9 | | | |
| 13 | | | | | | 4.6 | 3.7 | 17.4 | 4.2 | 17.0 | N/A | 6.1 | | 5.3 | 10.3 | 5.6 | | | |
| 15 | | | | | | 5.1 | 3.8 | 18.4 | 4.0 | 18.3 | 7.6 | 3.9 | | 5.5 | 18.0 | 6.6 | | | |

* Mouse sacrificed at 3 months for 3-month glycogen assay
** Mouse died

TABLE 53
Serum Anti-CD63:GAA Levels (μg/mL)
in Neonatal Mice with Episomal Group.

| | Episomal AAV | | | | | | | | | | |
|---|---|---|---|---|---|---|---|---|---|---|---|
| Months | * | * | * | ** | | | ** | | | | |
| 0.23 | 0 | 0 | 1.9 | 0 | 2.2 | 4.1 | 2.5 | 2.7 | 3.7 | 3.4 | 3.6 |
| 1 | 0 | 0 | 0 | 0 | 0 | 0 | 0 | 0 | 0 | 0 | 0 |
| 3 | 0 | 0 | 0 | 0 | 0 | 0 | 0 | 0.3 | 0.4 | 0.5 | 0 |
| 4 | | | | 0 | 0 | 0 | 0 | 0 | 0 | 0 | 0 |
| 5 | | | | | 0 | 0 | 0 | 0 | 0 | 0.6 | 0 |
| 6 | | | | | 0 | 0 | 0 | 0 | 0.5 | 0.6 | 0 |
| 7 | | | | | 0 | 0 | 0 | 0 | 0 | 0 | 0 |
| 8 | | | | | 0 | 0.5 | 0 | 0 | 0.5 | 1 | 0 |
| 9 | | | | | 0 | 0 | 0 | 0 | 0 | 0 | 0 |
| 12 | | | | | 0 | 0 | 0 | 0 | 0 | 0 | 0 |
| 13 | | | | | 0 | 0 | 0 | 0 | 0 | 0 | 0 |
| 15 | | | | | 0 | 0 | | 0 | 0 | 0 | 0 |

* Mouse sacrificed

TABLE 54
Glycogen Levels (μg/mg Tissue) in Neonatal Mice.

| | Untreated KO | | | | Episomal AAV | | | Gene Insertion | | | | |
|---|---|---|---|---|---|---|---|---|---|---|---|---|
| Heart | 20.16 | 18.52 | 20.14 | 21.92 | 0.16 | 0.1 | 0.1 | 0.08 | 0.06 | 0.08 | 0.04 | 0.02 |
| Quadricep | 8.96 | 10.83 | 9.89 | 9.63 | 4.18 | 2.13 | 4.21 | 0.89 | 0.77 | 0.82 | 0.1 | 0.58 |
| Gastrocnemius | 10.39 | 10.65 | 9.31 | 9.77 | 5.58 | 3.66 | 3.75 | 1.04 | 0.83 | 1.12 | 0.38 | 0.73 |
| Diaphragm | 10.05 | 7.73 | 11.33 | 9.6 | 0.5 | 0.59 | 1.7 | 0.57 | 0.7 | 0.85 | 0.34 | 0.9 |

TABLE 55
Glycogen Levels (μg/mg Tissue) in Neonatal Mice.

| | WT | | | | | | | | | |
|---|---|---|---|---|---|---|---|---|---|---|
| Heart | 0.18 | 0.03 | 0.09 | 0.12 | 0.04 | 0.04 | | | | |
| Quadricep | 0.95 | 0.77 | 0.86 | 1.01 | 1.35 | 0.85 | | | | |
| Gastrocnemius | 0.8 | 0.68 | 0.61 | 1.02 | 1.06 | 0.53 | | | | |
| Diaphragm | 0.6 | 0.12 | 2.24 | 1.25 | 0.22 | 0.03 | | | | |
| Cerebrum | 0.02664 | 0 | 0 | 0.04436 | 0 | 0.00255 | | | | |
| Spinal Cord | 0.01999 | 0 | 0 | 0 | 0.026 | 0 | | | | |
| | Untreated | | | | | | | | | |
| Heart | 40.73 | 42.15 | 45.87 | 46.84 | 39.15 | | | | | |
| Quadricep | 12.42 | 11.02 | 14.71 | 15.05 | 13.43 | | | | | |
| Gastrocnemius | * | 10.99 | 11.6 | 14.56 | 12.86 | | | | | |
| Diaphragm | 16.49 | 10.57 | 18.33 | 17.3 | 11.87 | | | | | |
| Cerebrum | 7.28 | 6.26 | 7.02 | 6.98 | 8.23 | | | | | |
| Spinal Cord | 8.46 | 10.34 | 9.37 | 9.94 | 9.49 | | | | | |
| | P1 episomal | | | | | | | | | |
| Heart | 0.42 | 0.17 | 0.69 | 0.21 | 0.09 | 0.09 | | | | |
| Quadricep | 11.27 | 8.47 | 1.85 | 2.72 | 1.43 | 0.96 | | | | |
| Gastrocnemius | 7.73 | 5.36 | 2.02 | 2.18 | 2.03 | 1.84 | | | | |
| Diaphragm | 3.09 | 0.8 | 0.74 | 0.76 | 0.33 | 0.42 | | | | |
| Cerebrum | 8.26 | 5.63 | 7.25 | 7.48 | 5.87 | 6.33 | | | | |
| Spinal Cord | 6.42 | 4.93 | 7.46 | 7.13 | 7.61 | 7.55 | | | | |
| | P1 insertion | | | | | | | | | |
| Heart | 0.04 | 0.12 | 0.13 | 0.06 | 0.25 | 2.1 | 0 | 0.05 | 0.04 | 0.07 |
| Quadricep | 0.6 | 0.64 | 0.68 | 0.54 | 0.58 | 0.61 | 0.27 | 0.85 | 0.35 | 0.5 |
| Gastrocnemius | 0.43 | 0.65 | 0.51 | 0.51 | 0.46 | 0.9 | 0.27 | 1.06 | 0.24 | 0.43 |
| Diaphragm | 0.16 | 0.29 | 0.08 | 0.12 | 0.39 | 0.77 | 0 | 0 | 0.59 | 0.12 |
| Cerebrum | 3.09 | 4.59 | 1.18 | 3.06 | 1.87 | 2.42 | 3.33 | 2.2 | 2.39 | 3.29 |
| Spinal Cord | 3.61 | 4.89 | 1.88 | 3.55 | 1.03 | 3.79 | 3.39 | 3.72 | 2.23 | 3.42 |

[0790] To assess whether the improved glycogen reduction observed with the insertion template in neonatal mice translated into improved muscle function, the mice were tested on grip strength apparatuses at 15 months post-administration. Limb grip strength was measured with a force meter (Columbus Instruments, Columbus, OH, USA). All tests were performed in triplicate. Mice treated with the insertion template showed significantly improved performance compared to mice treated with the episomal construct on the grip strength test. In fact, the grip strength in the insertion group tracked closely with that of wild type mice at 15 months post-treatment, whereas there was no difference in the grip strength in the episomal group tracked compared to the untreated group. See FIG. 25 and Table 56. These results show that, in neonatal mice, the insertion approach shows vastly improved durability of expression compared to the episomal approach, and better substrate reduction, indicating that insertion is the superior approach for pediatric indications.

TABLE 56
Grip Strength (Newtons) in Neonatal Mice.

| Wild-type | Untreated KO | P1 insertion AAV + LNP | P1 episomal AAV |
|---|---|---|---|
| 2.21 | 1.39 | 2.44 | 1.83 |
| 2.21 | 1.63 | 2.34 | 1.47 |
| 2.52 | 1.48 | 2.51 | 0.94 |
| 2.55 | 1.66 | 2.68 | 1.81 |
| 2.81 | 1.37 | 3.13 | 2.2 |
| 2.69 | 2.27 | 0.95 | 2.61 |
| 3.29 | 1.5 | 2.99 | |
| 2.79 | | 2.42 | |
| | | 2.66 | |
| | | 3.13 | |

[0791] An experiment was performed in which 4-month old Gaa^{-/-};Alb^{hu/hu} mice (n=3) were dosed intravenously with 7.5e10 vg/mouse recombinant AAV8 anti-CD63:GAA insertion template (REGV044) and 1 mg/kg LNP-g9860 in order to validate that anti-CD63:GAA can be inserted into mice humanized for albumin using human albumin gRNA. Blood was collected and serum prepared at 7 days, 14 days, 35 days, and 60 days post-administration. GAA serum levels up to ˜3 μg/mL were observed and were maintained over the time course (data not shown), confirming that anti-CD63:GAA can be inserted into mice humanized for albumin using human albumin gRNA.

[0792] In summary, the combination of the highly precise and targeted CRISPR/Cas9 technology delivered by LNP and the anti-CD63:GAA DNA template delivered by the selected rAAV8 vector allows for long-term expression of anti-CD63:GAA protein from hepatocytes and delivery to muscle cells affected in PD, potentially providing a life-long effective treatment to PD patients, including neonatal patients.

[0793] These results show that, in neonatal mice, the insertion approach shows vastly improved durability of expression compared to the episomal approach, indicating that insertion is the superior approach in neonatal subjects.

### Example 13. Optimized Anti-CD63:GAA DNA Templates

[0794] Optimized anti-CD63:GAA templates were generated to develop a lead for non-human primate (NHP) studies. To select a development cantidate, several versions of the insertion cassette were generated in which the nucleotide sequence encoding the anti-CD63:GAA was modified (e.g., by depleting CpGs). Table 57 lists the different versions of anti-CD63:GAA inserts designed. In addition, the GS 50 construct was further optimized to remove the six activating CpG motifs but leaving the 44 non-activating CpG motifs (GS 44; SEQ ID NO: 740). The GS 0 construct was further optimized (GS 0v2; SEQ ID NO: 738) by removing an AATAA polyA, removing a cryptic splice acceptor, and replacing a glycine encoding GGGGGGGGGGG (SEQ ID NO: 743) with GGAGGAGGTGG (SEQ ID NO: 744).

TABLE 57
Anti-CD63:GAA Inserts for Insertion Cassettes.

| Anti-CD63:GAA Insert | Transgene CpG Content | SEQ ID NO |
|---|---|---|
| First generation | 181 | 734 |
| GS 0 | 0 | 737 |
| GS 0v2 | 0 | 738 |
| DC 0 | 0 | 735 |
| GS 1 | 1 | 739 |
| RE 8 | 8 | 742 |
| GS 50 | 50 | 741 |
| GS 44 | 44 | 740 |
| GA 0 | 0 | 736 |

[0795] Peripheral blood mononuclear cells (PBMCs) were isolated from human blood. Plasmacytoid dendritic cells (pDCs) were enriched and combined with pBMCs (1e4 pDCs+1e5 PBMCs per well). The cells were incubated for 16-18 hours with AAV6 or control CpG-oligodeoxynucleotides (ODNs). The supernatants were harvested, and an IFNα ELISA was performed. This assay assessed whether CpG-depleted anti-CD63:GAA sequences exhibited reduced IFN—I responses in a primary human plasmacytoid DC-based assay as compared to non-CpG-depleted sequences. The tested samples, including a positive control AAV6-GFP and a negative control CpG-depleted (0 CpG F9 transgene) template, are shown in Table 58. The results are shown in FIG. 26.

TABLE 58
AAV6 Anti-CD63:GAA Templates Tested
for IFNα response in pDC/AAV assay.

| | Transgene CpG | TOTAL CpG |
|---|---|---|
| Genome | content | content w/ITRs |
| AAV6 GFP | 99 | 175 |
| (SFFV_eGFP_WPRE) | | |
| First generation | 181 | 213 |
| GS 50 | 50 | 82 |
| GS 44 | 44 | 75 |
| GA 0 | 0 | 32 |
| GS 0 v2 | 0 | 32 |
| F9 0 CpG template | 0 | 33 |

[0796] Activity of the optimized templates was tested in a primary human hepatocyte assay. AAV templates were packaged into AAV2 viruses. Primary human hepatocytes were grown in 96-well plates and administered the AAV (AAV2, AAV6, or AAV8) containing the template DNA and LNP-g9860 at either fixed MOI with LNP dose titration or fixed LNP concentration with AAV dose titration. Supernatants were collected 7 days post-dosing and stored at −80 degrees Celsius. Supernatants were thawed and GAA activity in the supernatants was measured using a 4-methylumbelliferone-based fluorometric assay (K690, BioVision, Milpitas, CA, USA) as a measurement of amount of enzymatically active GAA produced and secreted from the cells. A first batch of optimized anti-CD63:GAA and anti-TfR:GAA templates were tested using AAV2 as shown in Table 59 and FIG. 27. The 50 CpG anti-CD63:GAA template expressed similarly to the native template, but the initial templates with fewer CpGs did not express well. Additional optimized anti-CD63:GAA templates were tested using AAV6 as shown in Table 60 and FIG. 28. The GA 0 CpG anti-CD63:GAA template maintained expression compared to the native high CpG template in the in vitro primary human hepatocyte insertion assay. Similar results were observed using AAV8 instead of AAV6 (data not shown). The GA 0 CpG anti-CD63:GAA template produced functional GAA in the primary human hepatocyte assay at levels similar to the native while also producing reduced IFNα responses in the pDC/AAV assay.

TABLE 59
AAV2 Anti-CD63:GAA and Anti-TfR:GAA Templates
Tested for GAA Activity in PHH Supernatant.

| Genome | Transgene CpG content |
|---|---|
| First generation | 181 |
| GS 50 | 50 |
| RE 8 | 8 |
| GS 0 | 0 |
| 12837scfv-GAA-1 0 CpG 27 | 0 |
| 12837scfv-GAA-2 5 CpG 27 | 5 |

TABLE 60
AAV6 Anti-CD63:GAA Templates Tested
for GAA Activity in PHH Supernatant.

| Genome | Transgene CpG content |
|---|---|
| First generation | 181 |
| GS 50 | 50 |
| GS 44 | 8 |
| GA 0 | 0 |
| GS 0v2 | 0 |

[0797] Expression of the optimized templates was validated following insertion in Gaa^{-/-} mice as described in Example 12. Adult mice were dosed intravenously at with 1.97e12 vg/kg recombinant AAV8 anti-CD63:GAA insertion template (REGV044) and 1 mg/kg LNP-g666. The recombinant AAV8 templates tested included the native 181 CpG anti-CD63:GAA insertion template (REGV044), the GA 0 CpG template, the GSa50 CpG template, and the GS 44 CpG template. Untreated Gaa^{-/-} mice and wild type mice were used as controls. Blood was collected and serum prepared at 13 days, 34 days, and 92 days post-administration. As shown in FIG. 29A, the GA 0 CpG template showed similar serum expression in vivo in adult Gaa^{-/-} mice compared to the native high CpG template. As shown in FIG. 29B, the serum expression levels were consistent over three time points.

[0798] Expression of the GA 0 CpG anti-CD63:GAA template (SEQ ID NOS: 650 and 679) was evaluated following insertion in non-human primates. Two-year old cynomolgus macaques were administered recombinant AAV8 containing the CpG depleted anti-CD63:GAA template and an LNP-g9860 targeting the cynomolgus albumin intron 1. Three different recombinant AAV8 doses were used (0.3e13 vg/kg, 1.5e13 vg/kg, and 5.6e13 vg/kg) with a 3 mg/kg LNP dose. N=1 in the vehicle control group, and N=3 in the dosed groups. Serum GAA activity was measured using a fluorometric substrate assay in the monkeys through the course of the study. An AAV-dose-dependent increase in serum GAA activity levels was observed over time in the groups (FIG. 30A). This indicated successful insertion of the anti-CD63:GAA transgene into the albumin locus and resultant expression and secretion of the transgene in the animals. Tissues were collected at sacrifice (Day 89) and probed by western blot for presence of a 76 kDa lysosomal form of GAA. A dose-dependent increase of lysosomal GAA in the tissues was observed in the heart and diaphragm (FIG. 30B), which indicated delivery of the liver-derived anti-CD63:GAA protein to the distal tissues.

[0799] Activity of the optimized templates is validated in the PD mouse model, Gaa^{-/-};Cd63^{hu/hu}, as described in Example 4.

[0800] Expression of the optimized templates is evaluated in non-human primates. Two LNP doses and two gRNAs are tested. Specifically, expression is evaluated by administering 1 or 3 mg/kg of LNP-g9860 as described in Example 1 and 1.5e13 vg/kg of rAAV8 comprising each optimized template. An LNP with gRNA9844 is also used. Expression is analyzed over a 12-week study. Tissues are also collected for analysis of biodistribution of GAA, and GAA activity is assessed in collected tissues.

### Example 14. Optimized Anti-CD63:GAA and Anti-TfR:GAA DNA Templates to Minimize Mis-Splicing

[0801] To take advantage of the endogenous promoter and other regulatory elements in the albumin locus, the anti-CD63:GAA and anti-TfR:GAA DNA templates described herein do not contain a promoter itself but instead contain a splice acceptor. This adds a margin of safety, because if the DNA template were to randomly integrate or integrate in an off-target manner, there is no promoter present to potentially affect the regulation and expression of neighboring genes. In the system described herein, the guide RNA targets Cas9 to cut at a site in albumin intron 1, thus directing insertion of the DNA template to that site via non-homologous end joining. When transcription occurs at an albumin locus containing a gene insertion, transcription proceeds through albumin 5′ UTR, exon 1, the 5′ part of intron 1, the insertion sequence, and through a polyadenylation (polyA) sequence that is included at the 3′ end of the DNA insertion template. The RNA polymerase will then continue to transcribe the next several hundred to few thousand bases while the RNA cleavage and polyadenylation machinery acts on the polyA site. If this next several hundred to few thousand bases contains a splice acceptor site, it is possible that splicing can occur to this downstream splice acceptor site, cutting out the polyA. If splicing occurs from the splice donor at the end of albumin exon 1 to the 5′ of albumin exon 2, this creates a normal albumin transcript. However, if there are cryptic splice donors in the inserted DNA template, some portion of the transcript may be mis-spliced from a cryptic splice donor in the middle of the transcript to a downstream splice acceptor (such as the one at the 5′ end of albumin exon 2). See FIG. 37. Indeed, we found these mis-spliced events in a subset of transcripts when we sequenced liver lysates or cultured hepatocytes containing gene insertions of first generation, codon-optimized and CpG depleted anti-CD63:GAA or anti-TfR:GAA templates. For example, cryptic splice donors introduced by codon optimization and CpG depletion combined with weak transcript termination allowed mis-splicing into albumin exon 2. As shown in the intended transcript in FIG. 37, the nascent transcript should be cleaved and polyadenylated the polyadenylation sequence (pA). However, transcription may continue into ALB exon 2, and splicing machinery may get to the transcript before transcript cleavage/polyadenylation and splice from a cryptic splice donor to the ALB exon 2 splice acceptor as shown with the unintended transcript.

[0802] Sequences of these mis-spliced transcripts revealed several cryptic splice donors (i.e., sequences that function as splice donors in some fraction of transcripts but do not have a strong splice donor consensus sequence) within the sequence when the lead codon-optimized anti-CD63:GAA insertion template (coding sequence set forth in SEQ ID NO: 650 and construct set forth in SEQ ID NO: 783; construct VVT1254) or lead anti-TfR:GAA insertion template (coding sequence set forth in SEQ ID NO: 669 and construct set forth in SEQ ID NO: 779; construct VVT874) was inserted into the albumin locus.

[0803] The splicing pattern of ALB-anti-CD63:GAA fusion transcripts was evaluated by short-read RNA sequencing of liver samples from cynomolgus monkeys following administration of construct VVT1254 and LNP-g9860. Sequencing reads from all samples in the experiment were combined for analysis, and nucleotide positions with unintended transcripts at percentages equal to or greater than 1.0% were identified (FIG. 37, Table 61 (the GT or GC splice donor motifs and CAG splice acceptor motif in the nucleotide sequence are underlined)). The unintended transcripts identified were formed by splicing from cryptic splice donors in anti-CD63:GAA at nucleotide positions 132, 274, 723, 1830, or 3078. Position numbering is based on the last nucleotide present in the transgene before splicing out, where position 1 is the first nucleotide following the mouse Alb exon 2 splice acceptor in the anti-CD63:GAA nucleic acid constructs. The majority of these unintended transcripts were spliced from cryptic donor sites into the native splice acceptor preceding ALB exon 2. The unintended transcripts identified were also formed by splicing from the native splice donor following ALB exon 1 into the cryptic splice acceptor in anti-CD63: GAA at nucleotide position 6.

TABLE 61
Cryptic Splice Donors and Acceptors Identified
in ALB-anti-CD63:GAA Fusion Transcripts in
Cynomolgus Monkeys.

| | | | | % |
|---|---|---|---|---|
| | | | | Unintended |
| Nucleotide | | | | Transcripts |
| Position | | Cryptic | Location | at Position |
| in anti- | Splice | Site | in | in Cynomolgus |
| CD63:GAA | Type | Sequence | Transgene | Monkeys |
| 6 | Acceptor | CTTCAGGTC | anti-CD63 | 1.1% |
| | | | scFv | |
| 132 | Donor | AAAGGCCTG | anti-CD63 | 2.4% |
| | | | scFv | |
| 274 | Donor | CAGTGTACT | anti-CD63 | 1.8% |
| | | | scFv | |
| 723 | Donor | AAAGGTGGT | anti-CD63 | 1.8% |
| | | | scFv | |
| 1830 | Donor | CAAGGTGGT | hGAA | 1.1% |
| 3078 | Donor | AAAGGTGGA | hGAA | 13.8% |

[0804] Consistent with this, high molecular weight bands were observed in an anti-GAA western blot on NHP liver lysates from lead anti-CD63:GAA template-treated NHPs that were not observed in studies with the native, non-codon-optimized insertion template (data not shown).

[0805] The splicing pattern of ALB-anti-TfR:GAA fusion transcripts was evaluated by short-read RNA sequencing of primary human hepatocytes (PHH) from xenografted mouse livers (Phoenix Bio) following administration of construct VVT874 and LNP-g9860. Nucleotide positions with unintended transcripts at percentages equal to or greater than 1.0% were identified (Table 62 (the GT or GC splice donor motifs in the nucleotide sequence are underlined)). The unintended transcripts identified were formed by splicing from cryptic splice donors in anti-TfR:GAA at nucleotide positions 1857, 2331, or 3105. Position numbering is based on the last nucleotide present in the transgene before splicing out, where position 1 is the first nucleotide following the mouse Alb exon 2 splice acceptor in the anti-CD63:GAA nucleic acid constructs. The majority of these unintended transcripts were spliced from cryptic donor sites into the native splice acceptor preceding ALB exon 2. The cryptic splice donors in anti-TfR:GAA at nucleotide positions 1857 and 3105 correspond to the identified cryptic splice donors in anti-CD63:GAA at nucleotide positions 1830 and 3078.

TABLE 62
Cryptic Splice Donors Identified in ALB-anti-
TfR: GAA Fusion Transcripts in Primary Human
Hepatocytes.

| Nu- | Cor- | | | | |
|---|---|---|---|---|---|
| cleo- | respond- | | | | % |
| tide | ing | | | | Unin- |
| Posi- | Nucleo- | | | | tended |
| tion | tide | | | Loca- | Trans- |
| in | Position | | | tion | cripts |
| anti- | in anti- | | Cryptic | in | at Po- |
| TfR: | CD63: | Splice | Site | Trans- | sition |
| GAA | GAA | Type | Sequence | gene | in PHH |
| 1857 | 1830 | Donor | CAAGGTGGT | hGAA | 1.0% |
| 2331 | 2304 | Donor | AGAGGCACC | hGAA | 1.0% |
| 3105 | 3078 | Donor | AAAGGTGGA | hGAA | 37.5% |

[0806] To minimize mis-splicing, we applied a two-pronged approach: (1) identifying cryptic splice donors functionally via RNA sequencing (RNA-Seq), rather than prediction based on consensus sequences, and introducing synonymous mutations that disrupt the critical “GU” nucleotide pair that forms the core of the splice donor sequence, and (2) adding additional elements which have the net effect of increasing the time from when the polyA is transcribed to when RNA polymerase reaches the next splice acceptor site. More details on these approaches individually are below; we have also used the approaches in combination and found an additive effect.

[0807] Approach 1: While we screened for consensus splice donor sequences during the codon optimization and CpG removal process in Examples 10 and 13, when we examined transcripts by RNA-Seq we surprisingly found that a significant percentage of total transcripts (20-30%) were mis-spliced from a cryptic splice donor site in the cDNA for anti-CD63:GAA and anti-TfR:GAA, depending on the cell type tested. By RNA-Seq, we were able to determine the critical GU pair that facilitated mis-splicing at these sites and introduce synonymous mutations that eliminated mis-splicing from those positions.

[0808] Approach 2: We introduced either concatenated polyA signals (bovine growth hormone (BGH) and SV40), MAZ elements (SEQ ID NO: 755) which cause polymerase pausing, or additional stuffer sequence (SEQ ID NO: 754) to increase the time between when RNA polymerase transcribes the polyA to the time when it transcribes the next splice acceptor. We also tested the BGH polyA (SEQ ID NO: 751) and synthetic polyA (SPA) (SEQ ID NO: 753) sequences individually. The SV40 polyA is bidirectional, but the polyadenylation in the “late” orientation is more efficient than the polyadenylation in the “early” orientation. The SV40 polyA element is in the “early” orientation in the lead codon-optimized anti-CD63:GAA and anti-TfR:GAA templates. This orientation allows transcription to proceed through polyA, allowing cryptic splice donor sites within transgene to be utilized. This might be corrected by inverting the pA to the “late” orientation, using BGHpA, adding additional tandem polyAs, etc. There is a weak splice donor motif at position 3078 that is consistently detected in the RNA-Seq data as contributing to the largest fraction of observed unintended splicing products. This site can be mutated. Notably, to concatenate SV40 “Late” polyA with BGH, we mutated the transcription terminator sequences that are present in the “early” inverse orientation of SV40, thus making this version of the SV40 polyA unidirectional rather than bidirectional (“Sv40LuniPA” (SEQ ID NO: 752)). Thus, if our DNA insertion template is inserted into the genome in the non-functional “reverse” orientation, transcription should proceed straight through the entire albumin locus and the non-functional insertion should be spliced out along with the first intron, as there are no transcription terminator sequences present in the “reverse” orientation. The particular polyA sequences used were chosen as they contained no CpG dinucleotides.

[0809] As shown below, by combining both approaches, we were able to reduce the number of unintended, mis-spliced transcripts from >20% to <1% of total transcripts. This may improve protein expression, reduce potentially immunogenic fusion peptides from forming, and reduce ER stress and the unfolded protein response in the cells producing the protein product. In addition, as shown below, no loss of GAA activity was observed from any splice site or polyA modification. The constructs tested are shown in Table 63.

TABLE 63
Anti-CD63:GAA and Anti-TfR:GAA Templates Modified to Reduce Cryptic Splicing.

| Template | Comments | Status |
|---|---|---|
| VVT1125 - pAAV- | 1830 & 3078 GAA cryptic splice site corrections | Top performer in |
| TfR1GAA(GS0v2)-2Xfix- | Original PolyA replaced w/tandem bGH + SV40-late | PHH for GAA |
| bGH.sv40LuniPA (SEQ ID NO: | pA w/reverse strand AAUAAAs mutated | activity assay |
| 764) | | |
| VVT1126 - pAAV- | Original PolyA replaced w/bGHpA | |
| TfR1GAA(GS0v2)-bGHpA swap | | |
| (SEQ ID NO: 766) | | |
| VVT1129 - pAAV- | 1830 & 3078 GAA cryptic splice site corrections | Top performer in |
| TfR1GAA(GS0v2)-2Xfix-bGHpA | Original SV40-early PolyA replaced with bGHpA | PHH for GAA |
| (SEQ ID NO: 765) | | activity assay |
| VVT1118 - pAAV-CD63GAA- | Mutate position 3078 & insert bGHpA | |
| 3078fix-bGHpA (SEQ ID NO: 771) | | |
| VVT1119 - pAAV-CD63GAA- | Original PolyA replaced w/tandem bGHpA + SPA | |
| bGHpA.SPA swap (SEQ ID NO: | | |
| 773) | | |
| VVT1120 - pAAV-CD63GAA- | Original PolyA replaced w/tandem bGHpA + SPA w/ | |
| bGHpA.stuffer.SPA (SEQ ID NO: | intervening stuffer sequence | |
| 774) | | |
| VVT1121 - pAAV-CD63GAA- | CD63:GAA w/4 cryptic splice site corrections | |
| 4Xfix-bGH.sv40LuniPA (SEQ ID | (274, 723, 1830, 3078) | |
| NO: 768) | Original SV40-early pA replaced w/tandem bGH + | |
| | SV40-late pA w/reverse strand AAUAAAs mutated | |
| VVT1122 - pAAV-CD63GAA- | CD63:GAA w/4 cryptic splice site corrections | |
| 4Xfix-bGHpA (SEQ ID NO: 769) | Original SV40-early pA replaced w/bGHpA | |
| VVT1128 - pAAV-CD63GAA- | CD63:GAA w/6 cryptic splice site corrections | Top performer in |
| 6Xfix-bGH.sv40LuniPA (SEQ ID | Original SV40-early pA replaced w/tandem bGH + | PHH for GAA |
| NO: 777) | SV40-late pA w/reverse strand AAUAAAs mutated | activity assay |
| VVT1139 - pAAV-CD63GAA- | CD63:GAA w/6 cryptic splice site corrections | Top performer in |
| 6Xfix-bGHpA (SEQ ID NO: 778) | Original SV40-early pA replaced w/bGHpA | PHH for GAA |
| | | activity assay |
| VVT1123 - pAAV-CD63GAA- | 3078 cryptic splice site correction | |
| 3078fix-bGH.sv40LuniPA (1 CpG) | Original SV40-early pA replaced w/tandem bGH + | |
| (SEQ ID NO: 770) | SV40-late pA w/reverse strand AAUAAAs mutated | |
| VVT1124 - pAAV-CD63GAA- | Original PolyA replaced w/bGHpA | Worst performer |
| bGHpA swap (SEQ ID NO: 772) | | in PHH for GAA |
| | | activity assay |
| VVT1127 - pAAV-CD63GAA- | MAZ repeats added after original SV40-early polyA | |
| SV40E-MAZ (SEQ ID NO: 776) | to promote transcription termination | |
| VVT1138 - pAAV-CD63GAA- | Original PolyA replaced w/bGHpA followed by | |
| bGHpA-MAZ (SEQ ID NO: 775) | MAZ repeats | |

[0810] The splicing pattern of ALB-anti-CD63: GAA fusion transcripts was evaluated by short-read RNA sequencing of primary human hepatocytes (PHH) from xenografted mouse livers (Phoenix Bio) following administration of one of constructs VVT1119-VVT1127 or VVT1138-VVT1139 and LNP-g9860. Cryptic splicing at previously identified sites in anti-CD63:GAA (nucleotide positions 6, 132, 274, 723, 1830, and 3078) were evaluated, and an additional cryptic splice donor site at nucleotide position 2934 occurring in multiple samples was identified (Table 64). Mutating cryptic splice sequences eliminated cryptic splicing at those positions. Mutating cryptic splice sequences also resulted in shifting cryptic splicing activity to a previously minimal site (i.e., position 2934) in constructs VVT1122 and VVT1139, and the amount of cryptic splicing that removed was much larger than the amount shifted. Comparing construct VVT1119 to construct VVT1124, adding synthetic polyA sequence decreased cryptic splicing, and comparing construct VVT1120 to construct VVT1119, stuffer and synthetic polyA sequence further decreased cryptic splicing. Comparing construct VVT1138 to construct VVT1124, adding MAZ element decreased cryptic splicing. Comparing construct VVT1123 to construct VVT1118 and comparing construct VVT1121 to construct VVT1122, adding SV40Late in tandem with bGH decreased cryptic splicing compared to bGH alone.

TABLE 64
Percentages of Unintended Transcript in ALB-anti-CD63:GAA Fusion Transcripts Following Administration
of AAV Packaged with anti-CD63:GAA Redesigns and LNP-g9860 in Primary Human Hepatocytes.

| | # Cryptic | | | | | | | | | Est. | Est. |
|---|---|---|---|---|---|---|---|---|---|---|---|
| | Sites | PolyA | Nucleotide Position in anti-CD63:GAA | | | | | | | Intended | Unintended |
| Template | Removed | Sequence | 6 | 132 | 274 | 723 | 1830 | 2934 | 3078 | Transcript** | Transcripts** |
| VVT1254 | 0 | SV40Early | 1.1% | 2.4% | 1.8% | 1.8% | 1.1% | 0.1% | 13.8% | 77.9% | 22.1% |
| VVT1124 | 0 | bGH | 0.7% | 0.1% | 0.2% | 6.2% | 1.3% | 0.0% | 26.1% | 65.4% | 34.6% |
| VVT1119 | 0 | bGH + | 0.1% | 0.3% | 0.3% | 1.9% | 0.4% | 0.0% | 15.8% | 81.2% | 18.8% |
| | | synthetic | | | | | | | | | |
| VVT1120 | 0 | bGH + stuffer + | 0.3% | 0.1% | 0.2% | 3.1% | 1.3% | 0.3% | 3.7% | 91.0% | 9.0% |
| | | synthetic | | | | | | | | | |
| VVT1138 | 0 | bGH + MAZ | 0.7% | 0.4% | 0.2% | 1.9% | 0.6% | 0.1% | 5.7% | 90.4% | 9.6% |
| | | element | | | | | | | | | |
| VVT1127 | 0 | SV40Early + | 0.6% | 0.4% | 0.3% | 1.7% | 1.3% | 0.0% | 10.2% | 85.5% | 14.5% |
| | | MAZ element | | | | | | | | | |
| VVT1118 | 1 | bGH | 0.0% | 0.6% | 0.3% | 3.2% | 1.2% | 0.3% | 0.0% | 94.4% | 5.6% |
| VVT1123 | 1 | bGH + | 0.3% | 0.1% | 0.0% | 2.1% | 1.0% | 0.3% | 0.0% | 96.2% | 3.8% |
| | | SV40Late | | | | | | | | | |
| VVT1122 | 4 | bGH | 0.4% | 0.1% | 0.0% | 0.0% | 0.0% | 1.5% | 0.0% | 98.0% | 2.0% |
| VVT1121 | 4 | bGH + | 0.0% | 0.3% | 0.0% | 0.0% | 0.0% | 0.2% | 0.0% | 99.5% | 0.5% |
| | | SV40Late | | | | | | | | | |
| VVT1139 | 6 | bGH | 0.0% | 0.0% | 0.0% | 0.0% | 0.0% | 1.6% | 0.0% | 98.4% | 1.6% |
| VVT1128 | 6 | bGH + | 0.0% | 0.0% | 0.0% | 0.0% | 0.0% | 0.2% | 0.0% | 99.8% | 0.2% |
| | | SV40Late | | | | | | | | | |

Positions with bolded numbers indicate positions where cryptic splice was mutated in transgene template redesigns.
Templates had either 0, 1 (position 3078), 4 (positions 274, 723, 1830, and 3078), or 6 (6, 132, 274, 723, 1830, and 3078) cryptic sites mutated. Data for construct VVT1254 in cynomolgus monkeys is shown here for comparison.
**Calculated using only positions listed in table.

[0811] The splicing pattern of ALB-anti-TfR: GAA fusion transcripts was evaluated by short-read RNA sequencing of primary human hepatocytes (PHH) from xenografted mouse livers (Phoenix Bio) following administration of one of constructs VVT1125, VVT1126, or VVT1129 and LNP-g9860. Cryptic splicing at previously identified sites in anti-TfR: GAA (nucleotide positions 1857 and 3015) and also in anti-TfR: GAA redesigns (nucleotide position 2961) were evaluated (Table 65). Mutating cryptic splice sequences eliminated cryptic splicing at those positions. Comparing construct VVT1125 to construct VVT1129, adding SV40Late in tandem with bGH decreased cryptic splicing compared to bGH alone.

TABLE 65
Percentages of Unintended Transcript in ALB-anti-TfR:GAA Fusion Transcripts Following Administration
of AAV Packaged with anti-TfR:GAA Redesigns and LNP-g9860 in Primary Human Hepatocytes.

| | # | | Nucleotide Position in anti-TfR:GAA | | | | |
|---|---|---|---|---|---|---|---|
| | Cryptic | | (Corresponding Position in anti-CD63:GAA) | | | Estimated | Estimated |
| | Sites | PolyA | 1857 | 2961 | 3105 | Intended | Unintended |
| Template | Removed | Sequence | (1830) | (2934) | (3078) | Transcripts** | Transcripts** |
| VVT1126 | 0 | bGH | 1.3% | 0.4% | 19.1% | 79.2% | 20.8% |
| VVT1129 | 2 | bGH | 0.0% | 0.7% | 0.0% | 99.3% | 0.7% |
| VVT1125 | 2 | bGH + | 0.1% | 0.0% | 0.0% | 99.9% | 0.1% |
| | | SV40Late | | | | | |

Positions with bolded numbers indicate positions where cryptic splice was mutated in transgene template redesigns.
Templates had either 0 or 2 (positions 1857 and 3105) cryptic sites mutated.
**Calculated using only positions listed in table.

[0812] To test the impact of altering cryptic splice sites and polyA sequences on transcript splicing and gene expression following gene insertion, we evaluated gene insertion-mediated expression in human hepatocytes in vitro. Specifically, various sequence-optimized insertion DNA templates for both anti-CD63:GAA or anti-TfR:GAA were first packaged into AAV2. Next, primary human hepatocytes from xenografted mouse livers (Phoenix Bio) were seeded into 96-well plates and treated with AAV2 viruses at a fixed MOI of 6e4, plus variable levels of LNP-g9860. After incubating the cells for 7 days at 37° C., 5% CO₂, supernatants were collected and evaluated for GAA activity using a fluorometric Lysosomal alpha-Glucosidase Activity Assay Kit (Abcam), according to the manufacturer's instructions. We found that removing cryptic splice sites and strengthening polyA-mediated termination of transcription had no negative impact on expression from anti-CD63:GAA (FIG. 38) and anti-TfR:GAA insertion templates (FIG. 39). Engineering anti-CD63:GAA and anti-TfR:GAA insertion templates to remove cryptic splice sites and strengthen polyA sequences resulted in equivalent or enhanced GAA secretion versus unmodified templates.

[0813] The experiment was repeated using the top cantidates from the first screen in addition to the original codon-optimized anti-CD63:GAA and anti-TFR:GAA insertion templates in which the cryptic splicing was observed. See Table 66. Western blots on lysates is done to assay for loss/gain of translated splice-fusions of GAA. The secreted GAA activity assay was repeated to confirm the results from FIGS. 38-39. The secreted GAA activity assay was performed on supernatants 7 days after gene insertion of AAV template and titrated amounts of LNP. Addition of the unidirectional SV40 late polyA (sv40LuniPA) sequence (VVT1261, VVT1263) improved expression/secretion of GAA compared to the original templates VVT1251 and VVT1262. See FIGS. 40 and 41. Unexpectedly, we observed fold-level increases in the level of GAA activity achievable when combining synonymous substitutions at cryptic 5′ splice sites with a tandem poly(A) sequence comprised of bovine growth hormone poly(A) and this unidirectional variant of SV40 poly(A) in the “late” orientation (collectively referred to as bGH-SV40Luni). Mutation of splice sites showed improvement in GAA expression/secretion in the anti-CD63:GAA template in this experiment. RNA is extracted from the cell lysates, and RNAseq is performed. The decrease in aberrant GAA-albumin splice product transcripts is confirmed by this analysis. Western blots on lysates are probed for GAA and albumin. The new templates show a decrease in band intensity in sizes corresponding to GAA-albumin splice fusions (˜180 kDa), with increased band intensity in the correctly spliced anti-CD63:GAA or anti-TFR:GAA product (˜123 kDa).

TABLE 66
Anti-CD63:GAA and Anti-TfR:GAA Templates for Second PHH Experiment.

| Construct | Description |
|---|---|
| VVT1251 - pINT ITR130 12847scfv GA 0 CpG GAA | Original construct |
| SV40 pA (SEQ ID NO: 763) | |
| VVT1261 - AAV2 pAAV-TfRIGAA(GS0v2)-2Xfix- | 1830 & 3078 cryptic splice sites in GAA corrected & |
| bGH.sv40LuniPA (SEQ ID NO: 764) | original polyA replaced w/tandem bGH + SV40-late |
| | pA w/reverse strand AAUAAAs mutated |
| VVT1262 - AAV2 pAAV-TfRIGAA(GS0v2)-2Xfix- | 1830 & 3078 GAA cryptic splice site corrections & |
| bGHpA (SEQ ID NO: 765 | original SV40-early poly A replaced w/bGHpA |
| VVT1252 - pVPC_CD63GAA130 bp (SEQ ID NO: | Original construct |
| 767) | |
| VVT1263 - AAV2 pAAV-CD63GAA-6Xfix- | 6 cryptic splice site corrections & original SV40-early |
| bGH.sv40LuniPA (SEQ ID NO: 777) | pA replaced w/tandem bGH + SV40-late pA w/ |
| | reverse strand AAUAAAs mutated |
| VVT1264 - AAV2 pAAV-CD63GAA-6Xfix-bGHpA | 6 cryptic splice site corrections & original SV40-early |
| (SEQ ID NO: 778) | pA replaced w/bGHpA |

[0814] Recombinant AAV8 viral vectors are designed for in vivo validation in Gaa^{-/-}/Tfrc^{hum} mice or Gaa^{-/-}/Cd63^{hum} mice, and the constructs are validated in the mice. The constructs tested in vivo are shown in Table 67.

TABLE 67
Anti-CD63:GAA and Anti-TfR:GAA Templates for In Vivo Experiment.

| Construct | Description |
|---|---|
| pINT ITR130 anti-TfR1 GA 0 CpG GAA SV40 pA | Original construct |
| (SEQ ID NO: 763) | |
| pVPC.anti-CD63:GAA 130 bp (SEQ ID NO: 767) | Original construct |
| AAV8.anti- | 1830 & 3078 GAA cryptic splice sites corrected |
| TfR1:GAA(GS0v2).2Xfix.bGH.SV40LuniPA (SEQ ID | Original pA replaced w/tandem bGH + SV40-late pA |
| NO: 764) | w/reverse strand AAUAAAs mutated |
| AAV8 pAAV-anti-TfR1:GAA(GS0v2)-bGHpA swap | Original PolyA replaced w/bGHpA |
| (SEQ ID NO: 766) | |
| AAV8.anti-TfR1:GAA(GS0v2).2Xfix.bGHpA (SEQ | 1830 & 3078 GAA cryptic splice sites corrected |
| ID NO: 765) | Original SV40-early pA replaced w/bGHpA |
| AAV8.anti-CD63:GAA.6Xfix.bGH.SV40LuniPA | 6 cryptic splice site corrections & original SV40-early |
| (SEQ ID NO: 777) | pA replaced w/tandem bGH + SV40-late pA w/ |
| | reverse strand AAUAAAs mutated |
| AAV8.anti-CD63:GAA.6Xfix.bGHpA (SEQ ID NO: | 6 cryptic splice site corrections & original SV40-early |
| 778) | pA replaced w/bGHpA |

### Example 15. Anti-TfR:GAA Template Validation in Tfrc^{hum/hum};Gaa^{-/-} Mice

[0815] To confirm that the optimized anti-TfR:GAA DNA templates designed to minimize mis-splicing did not affect GAA activity or phenotype rescue in disease model mice, we treated 4-month-old Tfrc^{hum/hum}/Gaa^{-/-} mice with 3 mg/kg LNP-g666 and 3e12 vg/kg AAV8 delivering each of the templates shown in FIG. 42 (AAV8 anti-TfR1 GA OCpG GAA SV40 pA (SEQ ID NO: 763; original template); AAV8 anti-TfR1:GAA(GS0v2)-bGHpA swap (SEQ ID NO: 766; Original template+bGHpA); AAV8.anti-TfR1:GAA(GS0v2).2×fix.bGHpA (SEQ ID NO: 765; 2×SpliceFix+bGHpA); AAV8.anti-TfR1:GAA(GS0v2).2×fix.bGH.SV40LuniPA (SEQ ID NO: 764; 2×SpliceFix+bGH.SV40LuniPA; 5 animals per group). Controls were untreated Tfrc^{hum/hum};Gaa^{-/-} and Tfrc^{hum/hum};Gaa^{+/+} mice. We harvested tissues at 3 weeks post-injection snap frozen in LN2, for GAA western blot and glycogen quantification (methods the same as the previous examples).

[0816] RT-qPCR. Transgene anti-TfR:GAA DNA in liver nucleotide preps was quantified by Tagman using standard protocols. There was no statistically significant difference between the original template and the new edited templates in DNA template delivery to the liver or anti-TfR:GAA mRNA expression. See FIG. 43.

[0817] Western blot. Tissue lysates were prepared by lysis in RIPA buffer with protease inhibitors (1861282, Thermo Fisher, Waltham, MA, USA). Tissue lysates were homogenized with a bead homogenizer (FastPrep5, MP Biomedicals, Santa Ana, CA, USA). Cells or tissue lysates were run on SDS-PAGE gels using the Novex system (LifeTech Thermo, XP04200BOX, LC2675, LC3675, LC2676). Gels were transferred to low-fluorescence polyvinylidene fluoridev (PVDF) membrane (IPFL07810, LI-COR, Lincoln, NE, USA) and stained with Revert 700 Total Protein Stain (TPS; 926-11010 LI-COR, Lincoln, NE, USA), followed by blocking with Odyssey blocking buffer (927-500000, LI-COR, Lincoln, NE, USA) in Tris buffer saline with 0.1% Tween 20 and staining with antibodies against GAA (ab137068, Abcam, Cambridge, MA, USA), or anti-GAPDH (ab9484, Abcam, Cambridge, MA, USA) and the appropriate secondary (926-32213 or 925-68070, LI-COR, Lincoln, NE, USA). Blots were imaged with a LI-COR Odyssey CLx. Protein band intensity was quantified in LI-COR Image Studio software. The quantification of the mature 77 kDa GAA band for each sample was determined by normalizing to the lane's TPS signal (loading control). As shown in FIG. 44 (showing expression in serum cerebellum, cerebrum, quad, and liver), the 2×fix-bGHpA-sv40LunipA template was as effective at delivering GAA to the brain as the original lead template. There was some variability in the expression between animals, but overall, the amount of anti-TfR:GAA protein in the serum correlated with the amount of GAA delivered to the brain. There was no statistically significant difference between the original template and the new edited templates in anti-TfR:GAA protein expression. Anti-TfR:GAA delivery to target tissues was also the same across treatment groups.

[0818] Glycogen quantification. Tissue lysates were prepared by lysis in water with protease inhibitors (1861282, Thermo Fisher, Waltham, MA, USA). Tissue lysates were homogenized with a bead homogenizer (FastPrep5, MP Biomedicals, Santa Ana, CA, USA). Glycogen was quantified using Glycogen Assay Kit (Abam ab65620) as per manufacturer's protocol. As shown in FIG. 45A-45B, the 2×fix-bGHpA-sv40LunipA template was as effective as the original lead template at rescuing the glycogen storage phenotype in the brain (cerebrum, cerebellum) and muscle (quad) of Gaa^{-/-};Tfrc^{hu/hu} mice.

### Example 16. Anti-TfR:GAA Template Validation in Albumin Humanized Mice

[0819] The optimized anti-TfR:GAA DNA templates designed to minimize mis-splicing were tested in humanized albumin mice to assess whether editing two cryptic splice sites in the GAA sequence prevented cryptic splicing to albumin exon 2 and to assess whether a tandem bGHpA+SV40LuniPA increases likelihood of transcript termination. The experimental setup is shown in FIG. 46. Three-month-old Alb^{hum/hum} mice were treated intravenously with 3 mg/kg LNP-g9860 3e12 vg/kg of either REGV609 (original template with cryptic splice sites) or REGV950 (new lead template with 2 fixed splice sites and bGHpA+SV40LuniPA) (i.e., AAV8 anti-TfR1 GA OCpG GAA SV40 pA (SEQ ID NO: 763; original template); AAV8.anti-TfR1:GAA(GS0v2).2×fix.bGH.SV40LuniPA (SEQ ID NO: 764; 2×SpliceFix+bGH.SV40LuniPA)). Controls were saline-injected Alb^{hum/hum} mice. Tissues and serum were harvested and flash-frozen in LN2 at 2 weeks post-injection.

[0820] For western blot, tissue lysates were prepared by lysis in RIPA buffer with protease inhibitors (1861282, Thermo Fisher, Waltham, MA, USA). Tissue lysates were homogenized with a bead homogenizer (FastPrep5, MP Biomedicals, Santa Ana, CA, USA). Cells or tissue lysates were run on SDS-PAGE gels using the Novex system (LifeTech Thermo, XP04200BOX, LC2675, LC3675, LC2676). Gels were transferred to low-fluorescence polyvinylidene fluoridev (PVDF) membrane (IPFL07810, LI-COR, Lincoln, NE, USA) and stained with Revert 700 Total Protein Stain (TPS; 926-11010 LI-COR, Lincoln, NE, USA), followed by blocking with Odyssey blocking buffer (927-500000, LI-COR, Lincoln, NE, USA) in Tris buffer saline with 0.1% Tween 20 and staining with antibodies against GAA (ab137068, Abcam, Cambridge, MA, USA), or anti-GAPDH (ab9484, Abcam, Cambridge, MA, USA) and the appropriate secondary (926-32213 or 925-68070, LI-COR, Lincoln, NE, USA). Blots were imaged with a LI-COR Odyssey CLx. Protein band intensity was quantified in LI-COR Image Studio software. The background-corrected intensity of indicated GAA protein bands were quantified using ImageStudio software (Liborio). Individual bands were divided by the Total Protein Stain signal to normalize the signal for protein loading. Fold change per group was calculated compared to the REGV609 group, such that the average of the REGV609 group is equal to 1. For RT-qPCR, transgene anti-TfR:GAA DNA in liver nucleotide preps was quantified by Taqman using standard protocols.

[0821] The new lead REGV950 template did not express the unintended anti-TfR:GAA-albumin fusion protein in the liver, as seen by an absence of the 178 kDa band on the western blot, while the original REGV609 template did express this unintended product. See FIG. 47A. All other processed forms of GAA protein were unchanged between the two treatment groups. See FIGS. 47B-47C. These results are consistent with the previous RNAseq findings both in vitro and in vivo. There was no statistically significant difference between the original template and the new edited templates in DNA template delivery to the liver or anti-TfR:GAA mRNA expression. See FIG. 48.

1. A composition comprising a nucleic acid construct comprising a coding sequence for a multidomain therapeutic protein comprising a delivery domain fused to a lysosomal alpha-glucosidase polypeptide, wherein the lysosomal alpha-glucosidase coding sequence is CpG-depleted relative to a wild type lysosomal alpha-glucosidase coding sequence, wherein the delivery domain is a TfR-binding delivery domain.

2.-80. (canceled)

81. The composition of claim 1 in combination with a nuclease agent that targets a nuclease target site in a target genomic locus.

82.-108. (canceled)

109. A cell comprising the composition of claim 1.

110.-113. (canceled)

114. A method of inserting a nucleic acid encoding a multidomain therapeutic protein comprising a delivery domain fused to a lysosomal alpha-glucosidase into a target genomic locus in a cell or a population of cells, comprising administering to the cell or the population of cells the composition of claim 81,
wherein the nuclease agent cleaves the nuclease target site in the target genomic locus, and the nucleic acid construct or the nucleic acid encoding the multidomain therapeutic protein is inserted into the target genomic locus.

115. (canceled)

116. A method of expressing a multidomain therapeutic protein comprising a delivery domain fused to a lysosomal alpha-glucosidase in a cell or a population of cells, comprising administering to the cell or the population of cells the composition of claim 1,
wherein the coding sequence for the multidomain therapeutic protein is operably linked to a promoter in the nucleic acid construct and is expressed in the cell or population of cells.

117. A method of expressing a multidomain therapeutic protein comprising a delivery domain fused to a lysosomal alpha-glucosidase from a target genomic locus in a cell or a population of cells, comprising administering to the cell or the population of cells the composition of claim 81,
wherein the nuclease agent cleaves the nuclease target site in the target genomic locus, the nucleic acid construct or the coding sequence for the multidomain therapeutic protein is inserted into the target genomic locus to create a modified target genomic locus, and the multidomain therapeutic protein comprising the delivery domain fused to the lysosomal alpha-glucosidase is expressed from the modified target genomic locus.

118.-125. (canceled)

126. A method of inserting a nucleic acid encoding a multidomain therapeutic protein comprising a delivery domain fused to a lysosomal alpha-glucosidase into a target genomic locus in a cell in a subject, comprising administering to the subject the composition of any one of claims 81-108 claim 81,
wherein the nuclease agent cleaves the nuclease target site in the target genomic locus, and the nucleic acid construct or the nucleic acid encoding the multidomain therapeutic protein is inserted into the target genomic locus.

127. (canceled)

128. A method of expressing a multidomain therapeutic protein comprising a delivery domain fused to a lysosomal alpha-glucosidase protein in a cell in a subject, comprising administering to the subject the composition of claim 1,
wherein the coding sequence for the multidomain therapeutic protein is operably linked to a promoter in the nucleic acid construct and is expressed in the cell.

129. A method of expressing a multidomain therapeutic protein comprising a delivery domain fused to a lysosomal alpha-glucosidase protein from a target genomic locus in a cell in a subject, comprising administering to the subject the composition of claim 81,
wherein the nuclease agent cleaves the nuclease target site in the target genomic locus, the nucleic acid construct or the coding sequence for the multidomain therapeutic protein is inserted into the target genomic locus to create a modified target genomic locus, and the multidomain therapeutic protein comprising the delivery domain fused to the lysosomal alpha-glucosidase is expressed from the modified target genomic locus.

130.-136. (canceled)

137. A method of treating a lysosomal alpha-glucosidase deficiency in a subject in need thereof, comprising administering to the subject the composition of claim 1,
wherein the coding sequence for the multidomain therapeutic protein is operably linked to a promoter in the nucleic acid construct and is expressed in the subject.

138. A method of treating a lysosomal alpha-glucosidase deficiency in a subject in need thereof, comprising administering to the subject the composition of claim 81,
wherein the nuclease agent cleaves the nuclease target site in the target genomic locus, the nucleic acid construct or the coding sequence for the multidomain therapeutic protein is inserted into the target genomic locus to create a modified target genomic locus, and the multidomain therapeutic protein comprising the delivery domain fused to the lysosomal alpha-glucosidase is expressed from the modified target genomic locus.

139. (canceled)

140. A method of reducing glycogen accumulation in a tissue in a subject in need thereof, comprising administering to the subject the composition of claim 1,
wherein the coding sequence for the multidomain therapeutic protein is operably linked to a promoter in the nucleic acid construct and is expressed in the subject and reduces glycogen accumulation in the tissue.

141. A method of reducing glycogen accumulation in a tissue in a subject in need thereof, comprising administering to the subject the composition of claim 81,
wherein the nuclease agent cleaves the nuclease target site in the target genomic locus, the nucleic acid construct or the coding sequence for the multidomain therapeutic protein is inserted into the target genomic locus to create a modified target genomic locus, and the multidomain therapeutic protein comprising the delivery domain fused to the lysosomal alpha-glucosidase is expressed from the modified target genomic locus and reduces glycogen accumulation in the tissue.

142. (canceled)

143. (canceled)

144. A method of treating Pompe disease in a subject in need thereof, comprising administering to the subject the composition of claim 1,
wherein the coding sequence for the multidomain therapeutic protein is operably linked to a promoter in the nucleic acid construct and is expressed in the subject, thereby treating the Pompe disease.

145. A method of treating Pompe disease in a subject in need thereof, comprising administering to the subject the composition of claim 81,
wherein the nuclease agent cleaves the nuclease target site in the target genomic locus, the nucleic acid construct or the coding sequence for the multidomain therapeutic protein is inserted into the target genomic locus to create a modified target genomic locus, and the multidomain therapeutic protein comprising the delivery domain fused to the lysosomal alpha-glucosidase is expressed from the modified target genomic locus, thereby treating the Pompe disease.

146.-155. (canceled)

156. A method of preventing or reducing the onset of a sign or symptom of Pompe disease in a subject in need thereof, comprising administering to the subject the composition of claim 1,
wherein the coding sequence for the multidomain therapeutic protein is operably linked to a promoter in the nucleic acid construct and is expressed in the subject, thereby preventing or reducing the onset of a sign or symptom of the Pompe disease in the subject.

157. A method of preventing or reducing the onset of a sign or symptom of Pompe disease in a subject in need thereof, comprising administering to the subject the composition of claim 81,
wherein the nuclease agent cleaves the nuclease target site, the nucleic acid construct or the coding sequence for the multidomain therapeutic protein is inserted into the target genomic locus to create a modified target genomic locus, and the multidomain therapeutic protein comprising the delivery domain fused to the lysosomal alpha-glucosidase is expressed from the modified target genomic locus, thereby preventing or reducing the onset of a sign or symptom of the Pompe disease in the subject.

158.-188. (canceled)

189. A composition comprising a nucleic acid construct comprising a coding sequence for a multidomain therapeutic protein comprising a delivery domain fused to a lysosomal alpha-glucosidase polypeptide, wherein the lysosomal alpha-glucosidase coding sequence is CpG-depleted relative to a wild type lysosomal alpha-glucosidase coding sequence, wherein the delivery domain is a CD63-binding delivery domain.

190. The composition of claim 189 in combination with a nuclease agent that targets a nuclease target site in a target genomic locus.

191. A cell comprising the composition of claim 189.

192. A method of inserting a nucleic acid encoding a multidomain therapeutic protein comprising a delivery domain fused to a lysosomal alpha-glucosidase into a target genomic locus in a cell or a population of cells, comprising administering to the cell or the population of cells the composition of claim 190,
wherein the nuclease agent cleaves the nuclease target site in the target genomic locus, and the nucleic acid construct or the nucleic acid encoding the multidomain therapeutic protein is inserted into the target genomic locus.

193. A method of expressing a multidomain therapeutic protein comprising a delivery domain fused to a lysosomal alpha-glucosidase in a cell or a population of cells, comprising administering to the cell or the population of cells the composition of claim 189,
wherein the coding sequence for the multidomain therapeutic protein is operably linked to a promoter in the nucleic acid construct and is expressed in the cell or population of cells.

194. A method of expressing a multidomain therapeutic protein comprising a delivery domain fused to a lysosomal alpha-glucosidase from a target genomic locus in a cell or a population of cells, comprising administering to the cell or the population of cells the composition of claim 190,
wherein the nuclease agent cleaves the nuclease target site in the target genomic locus, the nucleic acid construct or the coding sequence for the multidomain therapeutic protein is inserted into the target genomic locus to create a modified target genomic locus, and the multidomain therapeutic protein comprising the delivery domain fused to the lysosomal alpha-glucosidase is expressed from the modified target genomic locus.

195. A method of inserting a nucleic acid encoding a multidomain therapeutic protein comprising a delivery domain fused to a lysosomal alpha-glucosidase into a target genomic locus in a cell in a subject, comprising administering to the subject the composition of claim 190,
wherein the nuclease agent cleaves the nuclease target site in the target genomic locus, and the nucleic acid construct or the nucleic acid encoding the multidomain therapeutic protein is inserted into the target genomic locus.

196. A method of expressing a multidomain therapeutic protein comprising a delivery domain fused to a lysosomal alpha-glucosidase protein in a cell in a subject, comprising administering to the subject the composition of claim 189,
wherein the coding sequence for the multidomain therapeutic protein is operably linked to a promoter in the nucleic acid construct and is expressed in the cell.

197. A method of expressing a multidomain therapeutic protein comprising a delivery domain fused to a lysosomal alpha-glucosidase protein from a target genomic locus in a cell in a subject, comprising administering to the subject the composition of claim 190,
wherein the nuclease agent cleaves the nuclease target site in the target genomic locus, the nucleic acid construct or the coding sequence for the multidomain therapeutic protein is inserted into the target genomic locus to create a modified target genomic locus, and the multidomain therapeutic protein comprising the delivery domain fused to the lysosomal alpha-glucosidase is expressed from the modified target genomic locus.

198. A method of treating a lysosomal alpha-glucosidase deficiency in a subject in need thereof, comprising administering to the subject the composition of claim 189,
wherein the coding sequence for the multidomain therapeutic protein is operably linked to a promoter in the nucleic acid construct and is expressed in the subject.

199. A method of treating a lysosomal alpha-glucosidase deficiency in a subject in need thereof, comprising administering to the subject the composition of claim 190,
wherein the nuclease agent cleaves the nuclease target site in the target genomic locus, the nucleic acid construct or the coding sequence for the multidomain therapeutic protein is inserted into the target genomic locus to create a modified target genomic locus, and the multidomain therapeutic protein comprising the delivery domain fused to the lysosomal alpha-glucosidase is expressed from the modified target genomic locus.

200. A method of reducing glycogen accumulation in a tissue in a subject in need thereof, comprising administering to the subject the composition of claim 189,
wherein the coding sequence for the multidomain therapeutic protein is operably linked to a promoter in the nucleic acid construct and is expressed in the subject and reduces glycogen accumulation in the tissue.

201. A method of reducing glycogen accumulation in a tissue in a subject in need thereof, comprising administering to the subject the composition of claim 190,
wherein the nuclease agent cleaves the nuclease target site in the target genomic locus, the nucleic acid construct or the coding sequence for the multidomain therapeutic protein is inserted into the target genomic locus to create a modified target genomic locus, and the multidomain therapeutic protein comprising the delivery domain fused to the lysosomal alpha-glucosidase is expressed from the modified target genomic locus and reduces glycogen accumulation in the tissue.

202. A method of treating Pompe disease in a subject in need thereof, comprising administering to the subject the composition of claim 189,
wherein the coding sequence for the multidomain therapeutic protein is operably linked to a promoter in the nucleic acid construct and is expressed in the subject, thereby treating the Pompe disease.

203. A method of treating Pompe disease in a subject in need thereof, comprising administering to the subject the composition of claim 190,
wherein the nuclease agent cleaves the nuclease target site in the target genomic locus, the nucleic acid construct or the coding sequence for the multidomain therapeutic protein is inserted into the target genomic locus to create a modified target genomic locus, and the multidomain therapeutic protein comprising the delivery domain fused to the lysosomal alpha-glucosidase is expressed from the modified target genomic locus, thereby treating the Pompe disease.

204. A method of preventing or reducing the onset of a sign or symptom of Pompe disease in a subject in need thereof, comprising administering to the subject the composition of claim 189,
wherein the coding sequence for the multidomain therapeutic protein is operably linked to a promoter in the nucleic acid construct and is expressed in the subject, thereby preventing or reducing the onset of a sign or symptom of the Pompe disease in the subject.

205. A method of preventing or reducing the onset of a sign or symptom of Pompe disease in a subject in need thereof, comprising administering to the subject the composition of claim 190,
wherein the nuclease agent cleaves the nuclease target site, the nucleic acid construct or the coding sequence for the multidomain therapeutic protein is inserted into the target genomic locus to create a modified target genomic locus, and the multidomain therapeutic protein comprising the delivery domain fused to the lysosomal alpha-glucosidase is expressed from the modified target genomic locus, thereby preventing or reducing the onset of a sign or symptom of the Pompe disease in the subject.

The application's sequence listing, which the Patent Office published only in electronic form, follows.

SEQUENCE LISTING (842 sequences)

SEQ ID NO: 1 - RNA, 4423 nt, synthetic construct
  source 1..4423: mol_type = other RNA
gggaagctcagaataaacgctcaactttggccggatctgccaccatggacaagaagtactccatcggcctggacatcggcaccaactccgtgggctgggccgtgatcaccgacgagtacaaggtgccctccaagaagttcaaggtgctgggcaacaccgaccggcactccatcaagaagaacctgatcggcgccctgctgttcgactccggcgagaccgccgaggccacccggctgaagcggaccgcccggcggcggtacacccggcggaagaaccggatctgctacctgcaggagatcttctccaacgagatggccaaggtggacgactccttcttccaccggctggaggagtccttcctggtggaggaggacaagaagcacgagcggcaccccatcttcggcaacatcgtggacgaggtggcctaccacgagaagtaccccaccatctaccacctgcggaagaagctggtggactccaccgacaaggccgacctgcggctgatctacctggccctggcccacatgatcaagttccggggccacttcctgatcgagggcgacctgaaccccgacaactccgacgtggacaagctgttcatccagctggtgcagacctacaaccagctgttcgaggagaaccccatcaacgcctccggcgtggacgccaaggccatcctgtccgcccggctgtccaagtcccggcggctggagaacctgatcgcccagctgcccggcgagaagaagaacggcctgttcggcaacctgatcgccctgtccctgggcctgacccccaacttcaagtccaacttcgacctggccgaggacgccaagctgcagctgtccaaggacacctacgacgacgacctggacaacctgctggcccagatcggcgaccagtacgccgacctgttcctggccgccaagaacctgtccgacgccatcctgctgtccgacatcctgcgggtgaacaccgagatcaccaaggcccccctgtccgcctccatgatcaagcggtacgacgagcaccaccaggacctgaccctgctgaaggccctggtgcggcagcagctgcccgagaagtacaaggagatcttcttcgaccagtccaagaacggctacgccggctacatcgacggcggcgcctcccaggaggagttctacaagttcatcaagcccatcctggagaagatggacggcaccgaggagctgctggtgaagctgaaccgggaggacctgctgcggaagcagcggaccttcgacaacggctccatcccccaccagatccacctgggcgagctgcacgccatcctgcggcggcaggaggacttctaccccttcctgaaggacaaccgggagaagatcgagaagatcctgaccttccggatcccctactacgtgggccccctggcccggggcaactcccggttcgcctggatgacccggaagtccgaggagaccatcaccccctggaacttcgaggaggtggtggacaagggcgcctccgcccagtccttcatcgagcggatgaccaacttcgacaagaacctgcccaacgagaaggtgctgcccaagcactccctgctgtacgagtacttcaccgtgtacaacgagctgaccaaggtgaagtacgtgaccgagggcatgcggaagcccgccttcctgtccggcgagcagaagaaggccatcgtggacctgctgttcaagaccaaccggaaggtgaccgtgaagcagctgaaggaggactacttcaagaagatcgagtgcttcgactccgtggagatctccggcgtggaggaccggttcaacgcctccctgggcacctaccacgacctgctgaagatcatcaaggacaaggacttcctggacaacgaggagaacgaggacatcctggaggacatcgtgctgaccctgaccctgttcgaggaccgggagatgatcgaggagcggctgaagacctacgcccacctgttcgacgacaaggtgatgaagcagctgaagcggcggcggtacaccggctggggccggctgtcccggaagctgatcaacggcatccgggacaagcagtccggcaagaccatcctggacttcctgaagtccgacggcttcgccaaccggaacttcatgcagctgatccacgacgactccctgaccttcaaggaggacatccagaaggcccaggtgtccggccagggcgactccctgcacgagcacatcgccaacctggccggctcccccgccatcaagaagggcatcctgcagaccgtgaaggtggtggacgagctggtgaaggtgatgggccggcacaagcccgagaacatcgtgatcgagatggcccgggagaaccagaccacccagaagggccagaagaactcccgggagcggatgaagcggatcgaggagggcatcaaggagctgggctcccagatcctgaaggagcaccccgtggagaacacccagctgcagaacgagaagctgtacctgtactacctgcagaacggccgggacatgtacgtggaccaggagctggacatcaaccggctgtccgactacgacgtggaccacatcgtgccccagtccttcctgaaggacgactccatcgacaacaaggtgctgacccggtccgacaagaaccggggcaagtccgacaacgtgccctccgaggaggtggtgaagaagatgaagaactactggcggcagctgctgaacgccaagctgatcacccagcggaagttcgacaacctgaccaaggccgagcggggcggcctgtccgagctggacaaggccggcttcatcaagcggcagctggtggagacccggcagatcaccaagcacgtggcccagatcctggactcccggatgaacaccaagtacgacgagaacgacaagctgatccgggaggtgaaggtgatcaccctgaagtccaagctggtgtccgacttccggaaggacttccagttctacaaggtgcgggagatcaacaactaccaccacgcccacgacgcctacctgaacgccgtggtgggcaccgccctgatcaagaagtaccccaagctggagtccgagttcgtgtacggcgactacaaggtgtacgacgtgcggaagatgatcgccaagtccgagcaggagatcggcaaggccaccgccaagtacttcttctactccaacatcatgaacttcttcaagaccgagatcaccctggccaacggcgagatccggaagcggcccctgatcgagaccaacggcgagaccggcgagatcgtgtgggacaagggccgggacttcgccaccgtgcggaaggtgctgtccatgccccaggtgaacatcgtgaagaagaccgaggtgcagaccggcggcttctccaaggagtccatcctgcccaagcggaactccgacaagctgatcgcccggaagaaggactgggaccccaagaagtacggcggcttcgactcccccaccgtggcctactccgtgctggtggtggccaaggtggagaagggcaagtccaagaagctgaagtccgtgaaggagctgctgggcatcaccatcatggagcggtcctccttcgagaagaaccccatcgacttcctggaggccaagggctacaaggaggtgaagaaggacctgatcatcaagctgcccaagtactccctgttcgagctggagaacggccggaagcggatgctggcctccgccggcgagctgcagaagggcaacgagctggccctgccctccaagtacgtgaacttcctgtacctggcctcccactacgagaagctgaagggctcccccgaggacaacgagcagaagcagctgttcgtggagcagcacaagcactacctggacgagatcatcgagcagatctccgagttctccaagcgggtgatcctggccgacgccaacctggacaaggtgctgtccgcctacaacaagcaccgggacaagcccatccgggagcaggccgagaacatcatccacctgttcaccctgaccaacctgggcgcccccgccgccttcaagtacttcgacaccaccatcgaccggaagcggtacacctccaccaaggaggtgctggacgccaccctgatccaccagtccatcaccggcctgtacgagacccggatcgacctgtcccagctgggcggcgacggcggcggctcccccaagaagaagcggaaggtgtgactagcaccagcctcaagaacacccgaatggagtctctaagctacataataccaacttacactttacaaaatgttgtcccccaaaatgtagccattcgtatctgctcctaataaaaagaaagtttcttcacattctctcgagaaaaaaaaaaaaaaaaaaaaaaaaaaaaaaaaaaaaaaaaaaaaaaaaaaaaaaaaaaaaaaaaaaaaaaaaaaaaaaaaaaaaaaaaaaaaatctag

SEQ ID NO: 2 - RNA, 4140 nt, synthetic construct
  source 1..4140: mol_type = other RNA
atggacaagaagtactccatcggcctggacatcggcaccaactccgtgggctgggccgtgatcaccgacgagtacaaggtgccctccaagaagttcaaggtgctgggcaacaccgaccggcactccatcaagaagaacctgatcggcgccctgctgttcgactccggcgagaccgccgaggccacccggctgaagcggaccgcccggcggcggtacacccggcggaagaaccggatctgctacctgcaggagatcttctccaacgagatggccaaggtggacgactccttcttccaccggctggaggagtccttcctggtggaggaggacaagaagcacgagcggcaccccatcttcggcaacatcgtggacgaggtggcctaccacgagaagtaccccaccatctaccacctgcggaagaagctggtggactccaccgacaaggccgacctgcggctgatctacctggccctggcccacatgatcaagttccggggccacttcctgatcgagggcgacctgaaccccgacaactccgacgtggacaagctgttcatccagctggtgcagacctacaaccagctgttcgaggagaaccccatcaacgcctccggcgtggacgccaaggccatcctgtccgcccggctgtccaagtcccggcggctggagaacctgatcgcccagctgcccggcgagaagaagaacggcctgttcggcaacctgatcgccctgtccctgggcctgacccccaacttcaagtccaacttcgacctggccgaggacgccaagctgcagctgtccaaggacacctacgacgacgacctggacaacctgctggcccagatcggcgaccagtacgccgacctgttcctggccgccaagaacctgtccgacgccatcctgctgtccgacatcctgcgggtgaacaccgagatcaccaaggcccccctgtccgcctccatgatcaagcggtacgacgagcaccaccaggacctgaccctgctgaaggccctggtgcggcagcagctgcccgagaagtacaaggagatcttcttcgaccagtccaagaacggctacgccggctacatcgacggcggcgcctcccaggaggagttctacaagttcatcaagcccatcctggagaagatggacggcaccgaggagctgctggtgaagctgaaccgggaggacctgctgcggaagcagcggaccttcgacaacggctccatcccccaccagatccacctgggcgagctgcacgccatcctgcggcggcaggaggacttctaccccttcctgaaggacaaccgggagaagatcgagaagatcctgaccttccggatcccctactacgtgggccccctggcccggggcaactcccggttcgcctggatgacccggaagtccgaggagaccatcaccccctggaacttcgaggaggtggtggacaagggcgcctccgcccagtccttcatcgagcggatgaccaacttcgacaagaacctgcccaacgagaaggtgctgcccaagcactccctgctgtacgagtacttcaccgtgtacaacgagctgaccaaggtgaagtacgtgaccgagggcatgcggaagcccgccttcctgtccggcgagcagaagaaggccatcgtggacctgctgttcaagaccaaccggaaggtgaccgtgaagcagctgaaggaggactacttcaagaagatcgagtgcttcgactccgtggagatctccggcgtggaggaccggttcaacgcctccctgggcacctaccacgacctgctgaagatcatcaaggacaaggacttcctggacaacgaggagaacgaggacatcctggaggacatcgtgctgaccctgaccctgttcgaggaccgggagatgatcgaggagcggctgaagacctacgcccacctgttcgacgacaaggtgatgaagcagctgaagcggcggcggtacaccggctggggccggctgtcccggaagctgatcaacggcatccgggacaagcagtccggcaagaccatcctggacttcctgaagtccgacggcttcgccaaccggaacttcatgcagctgatccacgacgactccctgaccttcaaggaggacatccagaaggcccaggtgtccggccagggcgactccctgcacgagcacatcgccaacctggccggctcccccgccatcaagaagggcatcctgcagaccgtgaaggtggtggacgagctggtgaaggtgatgggccggcacaagcccgagaacatcgtgatcgagatggcccgggagaaccagaccacccagaagggccagaagaactcccgggagcggatgaagcggatcgaggagggcatcaaggagctgggctcccagatcctgaaggagcaccccgtggagaacacccagctgcagaacgagaagctgtacctgtactacctgcagaacggccgggacatgtacgtggaccaggagctggacatcaaccggctgtccgactacgacgtggaccacatcgtgccccagtccttcctgaaggacgactccatcgacaacaaggtgctgacccggtccgacaagaaccggggcaagtccgacaacgtgccctccgaggaggtggtgaagaagatgaagaactactggcggcagctgctgaacgccaagctgatcacccagcggaagttcgacaacctgaccaaggccgagcggggcggcctgtccgagctggacaaggccggcttcatcaagcggcagctggtggagacccggcagatcaccaagcacgtggcccagatcctggactcccggatgaacaccaagtacgacgagaacgacaagctgatccgggaggtgaaggtgatcaccctgaagtccaagctggtgtccgacttccggaaggacttccagttctacaaggtgcgggagatcaacaactaccaccacgcccacgacgcctacctgaacgccgtggtgggcaccgccctgatcaagaagtaccccaagctggagtccgagttcgtgtacggcgactacaaggtgtacgacgtgcggaagatgatcgccaagtccgagcaggagatcggcaaggccaccgccaagtacttcttctactccaacatcatgaacttcttcaagaccgagatcaccctggccaacggcgagatccggaagcggcccctgatcgagaccaacggcgagaccggcgagatcgtgtgggacaagggccgggacttcgccaccgtgcggaaggtgctgtccatgccccaggtgaacatcgtgaagaagaccgaggtgcagaccggcggcttctccaaggagtccatcctgcccaagcggaactccgacaagctgatcgcccggaagaaggactgggaccccaagaagtacggcggcttcgactcccccaccgtggcctactccgtgctggtggtggccaaggtggagaagggcaagtccaagaagctgaagtccgtgaaggagctgctgggcatcaccatcatggagcggtcctccttcgagaagaaccccatcgacttcctggaggccaagggctacaaggaggtgaagaaggacctgatcatcaagctgcccaagtactccctgttcgagctggagaacggccggaagcggatgctggcctccgccggcgagctgcagaagggcaacgagctggccctgccctccaagtacgtgaacttcctgtacctggcctcccactacgagaagctgaagggctcccccgaggacaacgagcagaagcagctgttcgtggagcagcacaagcactacctggacgagatcatcgagcagatctccgagttctccaagcgggtgatcctggccgacgccaacctggacaaggtgctgtccgcctacaacaagcaccgggacaagcccatccgggagcaggccgagaacatcatccacctgttcaccctgaccaacctgggcgcccccgccgccttcaagtacttcgacaccaccatcgaccggaagcggtacacctccaccaaggaggtgctggacgccaccctgatccaccagtccatcaccggcctgtacgagacccggatcgacctgtcccagctgggcggcgacggcggcggctcccccaagaagaagcggaaggtgtga

SEQ ID NO: 3 - DNA, 4140 bp, synthetic construct
  source 1..4140: mol_type = other DNA
atggacaagaagtactccatcggcctggacatcggcaccaactccgtgggctgggccgtgatcaccgacgagtacaaggtgccctccaagaagttcaaggtgctgggcaacaccgaccggcactccatcaagaagaacctgatcggcgccctgctgttcgactccggcgagaccgccgaggccacccggctgaagcggaccgcccggcggcggtacacccggcggaagaaccggatctgctacctgcaggagatcttctccaacgagatggccaaggtggacgactccttcttccaccggctggaggagtccttcctggtggaggaggacaagaagcacgagcggcaccccatcttcggcaacatcgtggacgaggtggcctaccacgagaagtaccccaccatctaccacctgcggaagaagctggtggactccaccgacaaggccgacctgcggctgatctacctggccctggcccacatgatcaagttccggggccacttcctgatcgagggcgacctgaaccccgacaactccgacgtggacaagctgttcatccagctggtgcagacctacaaccagctgttcgaggagaaccccatcaacgcctccggcgtggacgccaaggccatcctgtccgcccggctgtccaagtcccggcggctggagaacctgatcgcccagctgcccggcgagaagaagaacggcctgttcggcaacctgatcgccctgtccctgggcctgacccccaacttcaagtccaacttcgacctggccgaggacgccaagctgcagctgtccaaggacacctacgacgacgacctggacaacctgctggcccagatcggcgaccagtacgccgacctgttcctggccgccaagaacctgtccgacgccatcctgctgtccgacatcctgcgggtgaacaccgagatcaccaaggcccccctgtccgcctccatgatcaagcggtacgacgagcaccaccaggacctgaccctgctgaaggccctggtgcggcagcagctgcccgagaagtacaaggagatcttcttcgaccagtccaagaacggctacgccggctacatcgacggcggcgcctcccaggaggagttctacaagttcatcaagcccatcctggagaagatggacggcaccgaggagctgctggtgaagctgaaccgggaggacctgctgcggaagcagcggaccttcgacaacggctccatcccccaccagatccacctgggcgagctgcacgccatcctgcggcggcaggaggacttctaccccttcctgaaggacaaccgggagaagatcgagaagatcctgaccttccggatcccctactacgtgggccccctggcccggggcaactcccggttcgcctggatgacccggaagtccgaggagaccatcaccccctggaacttcgaggaggtggtggacaagggcgcctccgcccagtccttcatcgagcggatgaccaacttcgacaagaacctgcccaacgagaaggtgctgcccaagcactccctgctgtacgagtacttcaccgtgtacaacgagctgaccaaggtgaagtacgtgaccgagggcatgcggaagcccgccttcctgtccggcgagcagaagaaggccatcgtggacctgctgttcaagaccaaccggaaggtgaccgtgaagcagctgaaggaggactacttcaagaagatcgagtgcttcgactccgtggagatctccggcgtggaggaccggttcaacgcctccctgggcacctaccacgacctgctgaagatcatcaaggacaaggacttcctggacaacgaggagaacgaggacatcctggaggacatcgtgctgaccctgaccctgttcgaggaccgggagatgatcgaggagcggctgaagacctacgcccacctgttcgacgacaaggtgatgaagcagctgaagcggcggcggtacaccggctggggccggctgtcccggaagctgatcaacggcatccgggacaagcagtccggcaagaccatcctggacttcctgaagtccgacggcttcgccaaccggaacttcatgcagctgatccacgacgactccctgaccttcaaggaggacatccagaaggcccaggtgtccggccagggcgactccctgcacgagcacatcgccaacctggccggctcccccgccatcaagaagggcatcctgcagaccgtgaaggtggtggacgagctggtgaaggtgatgggccggcacaagcccgagaacatcgtgatcgagatggcccgggagaaccagaccacccagaagggccagaagaactcccgggagcggatgaagcggatcgaggagggcatcaaggagctgggctcccagatcctgaaggagcaccccgtggagaacacccagctgcagaacgagaagctgtacctgtactacctgcagaacggccgggacatgtacgtggaccaggagctggacatcaaccggctgtccgactacgacgtggaccacatcgtgccccagtccttcctgaaggacgactccatcgacaacaaggtgctgacccggtccgacaagaaccggggcaagtccgacaacgtgccctccgaggaggtggtgaagaagatgaagaactactggcggcagctgctgaacgccaagctgatcacccagcggaagttcgacaacctgaccaaggccgagcggggcggcctgtccgagctggacaaggccggcttcatcaagcggcagctggtggagacccggcagatcaccaagcacgtggcccagatcctggactcccggatgaacaccaagtacgacgagaacgacaagctgatccgggaggtgaaggtgatcaccctgaagtccaagctggtgtccgacttccggaaggacttccagttctacaaggtgcgggagatcaacaactaccaccacgcccacgacgcctacctgaacgccgtggtgggcaccgccctgatcaagaagtaccccaagctggagtccgagttcgtgtacggcgactacaaggtgtacgacgtgcggaagatgatcgccaagtccgagcaggagatcggcaaggccaccgccaagtacttcttctactccaacatcatgaacttcttcaagaccgagatcaccctggccaacggcgagatccggaagcggcccctgatcgagaccaacggcgagaccggcgagatcgtgtgggacaagggccgggacttcgccaccgtgcggaaggtgctgtccatgccccaggtgaacatcgtgaagaagaccgaggtgcagaccggcggcttctccaaggagtccatcctgcccaagcggaactccgacaagctgatcgcccggaagaaggactgggaccccaagaagtacggcggcttcgactcccccaccgtggcctactccgtgctggtggtggccaaggtggagaagggcaagtccaagaagctgaagtccgtgaaggagctgctgggcatcaccatcatggagcggtcctccttcgagaagaaccccatcgacttcctggaggccaagggctacaaggaggtgaagaaggacctgatcatcaagctgcccaagtactccctgttcgagctggagaacggccggaagcggatgctggcctccgccggcgagctgcagaagggcaacgagctggccctgccctccaagtacgtgaacttcctgtacctggcctcccactacgagaagctgaagggctcccccgaggacaacgagcagaagcagctgttcgtggagcagcacaagcactacctggacgagatcatcgagcagatctccgagttctccaagcgggtgatcctggccgacgccaacctggacaaggtgctgtccgcctacaacaagcaccgggacaagcccatccgggagcaggccgagaacatcatccacctgttcaccctgaccaacctgggcgcccccgccgccttcaagtacttcgacaccaccatcgaccggaagcggtacacctccaccaaggaggtgctggacgccaccctgatccaccagtccatcaccggcctgtacgagacccggatcgacctgtcccagctgggcggcgacggcggcggctcccccaagaagaagcggaaggtgtga

SEQ ID NO: 4 - DNA, 709 bp, Homo sapiens
  source 1..709: mol_type = other DNA
gtaagaaatccatttttctattgttcaacttttattctattttcccagtaaaataaagttttagtaaactctgcatctttaaagaattattttggcatttatttctaaaatggcatagtattttgtatttgtgaagtcttacaaggttatcttattaataaaattcaaacatcctaggtaaaaaaaaaaaaaggtcagaattgtttagtgactgtaattttcttttgcgcactaaggaaagtgcaaagtaacttagagtgactgaaacttcacagaatagggttgaagattgaattcataactatcccaaagacctatccattgcactatgctttatttaaaaaccacaaaacctgtgctgttgatctcataaatagaacttgtatttatatttattttcattttagtctgtcttcttggttgctgttgatagacactaaaagagtattagatattatctaagtttgaatataaggctataaatatttaataatttttaaaatagtattcttggtaattgaattattcttctgtttaaaggcagaagaaataattgaacatcatcctgagtttttctgtaggaatcagagcccaatattttgaaacaaatgcataatctaagtcaaatggaaagaaatataaaaagtaacattattacttcttgttttcttcagtatttaacaatccttttttttcttcccttgcccag

SEQ ID NO: 5-7 - skipped (3 entries)

SEQ ID NO: 8 - protein, 1391 aa, synthetic construct
MDKPKKKRKVKYSIGLDIGTNSVGWAVITDEYKVPSKKFKVLGNTDRHSIKKNLIGALLFDSGETAEATRLKRTARRRYTRRKNRICYLQEIFSNEMAKVDDSFFHRLEESFLVEEDKKHERHPIFGNIVDEVAYHEKYPTIYHLRKKLVDSTDKADLRLIYLALAHMIKFRGHFLIEGDLNPDNSDVDKLFIQLVQTYNQLFEENPINASGVDAKAILSARLSKSRRLENLIAQLPGEKKNGLFGNLIALSLGLTPNFKSNFDLAEDAKLQLSKDTYDDDLDNLLAQIGDQYADLFLAAKNLSDAILLSDILRVNTEITKAPLSASMIKRYDEHHQDLTLLKALVRQQLPEKYKEIFFDQSKNGYAGYIDGGASQEEFYKFIKPILEKMDGTEELLVKLNREDLLRKQRTFDNGSIPHQIHLGELHAILRRQEDFYPFLKDNREKIEKILTFRIPYYVGPLARGNSRFAWMTRKSEETITPWNFEEVVDKGASAQSFIERMTNFDKNLPNEKVLPKHSLLYEYFTVYNELTKVKYVTEGMRKPAFLSGEQKKAIVDLLFKTNRKVTVKQLKEDYFKKIECFDSVEISGVEDRFNASLGTYHDLLKIIKDKDFLDNEENEDILEDIVLTLTLFEDREMIEERLKTYAHLFDDKVMKQLKRRRYTGWGRLSRKLINGIRDKQSGKTILDFLKSDGFANRNFMQLIHDDSLTFKEDIQKAQVSGQGDSLHEHIANLAGSPAIKKGILQTVKVVDELVKVMGRHKPENIVIEMARENQTTQKGQKNSRERMKRIEEGIKELGSQILKEHPVENTQLQNEKLYLYYLQNGRDMYVDQELDINRLSDYDVDHIVPQSFLKDDSIDNKVLTRSDKNRGKSDNVPSEEVVKKMKNYWRQLLNAKLITQRKFDNLTKAERGGLSELDKAGFIKRQLVETRQITKHVAQILDSRMNTKYDENDKLIREVKVITLKSKLVSDFRKDFQFYKVREINNYHHAHDAYLNAVVGTALIKKYPKLESEFVYGDYKVYDVRKMIAKSEQEIGKATAKYFFYSNIMNFFKTEITLANGEIRKRPLIETNGETGEIVWDKGRDFATVRKVLSMPQVNIVKKTEVQTGGFSKESILPKRNSDKLIARKKDWDPKKYGGFDSPTVAYSVLVVAKVEKGKSKKLKSVKELLGITIMERSSFEKNPIDFLEAKGYKEVKKDLIIKLPKYSLFELENGRKRMLASAGELQKGNELALPSKYVNFLYLASHYEKLKGSPEDNEQKQLFVEQHKHYLDEIIEQISEFSKRVILADANLDKVLSAYNKHRDKPIREQAENIIHLFTLTNLGAPAAFKYFDTTIDRKRYTSTKEVLDATLIHQSITGLYETRIDLSQLGGDKRPAATKKAGQAKKKK

SEQ ID NO: 9 - DNA, 4176 bp, synthetic construct
  source 1..4176: mol_type = other DNA
atggacaagcccaagaaaaagcggaaagtgaagtacagcatcggcctggacatcggcaccaactctgtgggctgggccgtgatcaccgacgagtacaaggtgcccagcaagaaattcaaggtgctgggcaacaccgacaggcacagcatcaagaagaacctgatcggcgccctgctgttcgacagcggcgaaacagccgaggccaccagactgaagagaaccgccagaagaagatacaccaggcggaagaacaggatctgctatctgcaagagatcttcagcaacgagatggccaaggtggacgacagcttcttccacagactggaagagtccttcctggtggaagaggacaagaagcacgagagacaccccatcttcggcaacatcgtggacgaggtggcctaccacgagaagtaccccaccatctaccacctgagaaagaaactggtggacagcaccgacaaggccgacctgagactgatctacctggccctggcccacatgatcaagttcagaggccacttcctgatcgagggcgacctgaaccccgacaacagcgacgtggacaagctgttcatccagctggtgcagacctacaaccagctgttcgaggaaaaccccatcaacgccagcggcgtggacgccaaggctatcctgtctgccagactgagcaagagcagaaggctggaaaatctgatcgcccagctgcccggcgagaagaagaacggcctgttcggcaacctgattgccctgagcctgggcctgacccccaacttcaagagcaacttcgacctggccgaggatgccaaactgcagctgagcaaggacacctacgacgacgacctggacaacctgctggcccagatcggcgaccagtacgccgacctgttcctggccgccaagaacctgtctgacgccatcctgctgagcgacatcctgagagtgaacaccgagatcaccaaggcccccctgagcgcctctatgatcaagagatacgacgagcaccaccaggacctgaccctgctgaaagctctcgtgcggcagcagctgcctgagaagtacaaagaaatcttcttcgaccagagcaagaacggctacgccggctacatcgatggcggcgctagccaggaagagttctacaagttcatcaagcccatcctggaaaagatggacggcaccgaggaactgctcgtgaagctgaacagagaggacctgctgagaaagcagagaaccttcgacaacggcagcatcccccaccagatccacctgggagagctgcacgctatcctgagaaggcaggaagatttttacccattcctgaaggacaaccgggaaaagatcgagaagatcctgaccttcaggatcccctactacgtgggccccctggccagaggcaacagcagattcgcctggatgaccagaaagagcgaggaaaccatcaccccctggaacttcgaggaagtggtggacaagggcgccagcgcccagagcttcatcgagagaatgacaaacttcgataagaacctgcccaacgagaaggtgctgcccaagcacagcctgctgtacgagtacttcaccgtgtacaacgagctgaccaaagtgaaatacgtgaccgagggaatgagaaagcccgccttcctgagcggcgagcagaaaaaggccatcgtggacctgctgttcaagaccaacagaaaagtgaccgtgaagcagctgaaagaggactacttcaagaaaatcgagtgcttcgactccgtggaaatctccggcgtggaagatagattcaacgcctccctgggcacataccacgatctgctgaaaattatcaaggacaaggacttcctggataacgaagagaacgaggacattctggaagatatcgtgctgaccctgacactgtttgaggaccgcgagatgatcgaggaaaggctgaaaacctacgctcacctgttcgacgacaaagtgatgaagcagctgaagagaaggcggtacaccggctggggcaggctgagcagaaagctgatcaacggcatcagagacaagcagagcggcaagacaatcctggatttcctgaagtccgacggcttcgccaaccggaacttcatgcagctgatccacgacgacagcctgacattcaaagaggacatccagaaagcccaggtgtccggccagggcgactctctgcacgagcatatcgctaacctggccggcagccccgctatcaagaagggcatcctgcagacagtgaaggtggtggacgagctcgtgaaagtgatgggcagacacaagcccgagaacatcgtgatcgagatggctagagagaaccagaccacccagaagggacagaagaactcccgcgagaggatgaagagaatcgaagagggcatcaaagagctgggcagccagatcctgaaagaacaccccgtggaaaacacccagctgcagaacgagaagctgtacctgtactacctgcagaatggccgggatatgtacgtggaccaggaactggacatcaacagactgtccgactacgatgtggaccatatcgtgcctcagagctttctgaaggacgactccatcgataacaaagtgctgactcggagcgacaagaacagaggcaagagcgacaacgtgccctccgaagaggtcgtgaagaagatgaagaactactggcgacagctgctgaacgccaagctgattacccagaggaagttcgataacctgaccaaggccgagagaggcggcctgagcgagctggataaggccggcttcatcaagaggcagctggtggaaaccagacagatcacaaagcacgtggcacagatcctggactcccggatgaacactaagtacgacgaaaacgataagctgatccgggaagtgaaagtgatcaccctgaagtccaagctggtgtccgatttccggaaggatttccagttttacaaagtgcgcgagatcaacaactaccaccacgcccacgacgcctacctgaacgccgtcgtgggaaccgccctgatcaaaaagtaccctaagctggaaagcgagttcgtgtacggcgactacaaggtgtacgacgtgcggaagatgatcgccaagagcgagcaggaaatcggcaaggctaccgccaagtacttcttctacagcaacatcatgaactttttcaagaccgaaatcaccctggccaacggcgagatcagaaagcgccctctgatcgagacaaacggcgaaaccggggagatcgtgtgggataagggcagagacttcgccacagtgcgaaaggtgctgagcatgccccaagtgaatatcgtgaaaaagaccgaggtgcagacaggcggcttcagcaaagagtctatcctgcccaagaggaacagcgacaagctgatcgccagaaagaaggactgggaccccaagaagtacggcggcttcgacagccctaccgtggcctactctgtgctggtggtggctaaggtggaaaagggcaagtccaagaaactgaagagtgtgaaagagctgctggggatcaccatcatggaaagaagcagctttgagaagaaccctatcgactttctggaagccaagggctacaaagaagtgaaaaaggacctgatcatcaagctgcctaagtactccctgttcgagctggaaaacggcagaaagagaatgctggcctctgccggcgaactgcagaagggaaacgagctggccctgcctagcaaatatgtgaacttcctgtacctggcctcccactatgagaagctgaagggcagccctgaggacaacgaacagaaacagctgtttgtggaacagcataagcactacctggacgagatcatcgagcagatcagcgagttctccaagagagtgatcctggccgacgccaatctggacaaggtgctgtctgcctacaacaagcacagggacaagcctatcagagagcaggccgagaatatcatccacctgttcaccctgacaaacctgggcgctcctgccgccttcaagtactttgacaccaccatcgaccggaagaggtacaccagcaccaaagaggtgctggacgccaccctgatccaccagagcatcaccggcctgtacgagacaagaatcgacctgtctcagctgggaggcgacaagagacctgccgccactaagaaggccggacaggccaaaaagaagaagtga

SEQ ID NO: 10 - DNA, 4218 bp, synthetic construct
  source 1..4218: mol_type = other DNA
atggccccaaagaagaagcggaaggtcggtatccacggagtcccagcagccgacaagaagtacagcatcggcctggacatcggcaccaactctgtgggctgggccgtgatcaccgacgagtacaaggtgcccagcaagaaattcaaggtgctgggcaacaccgaccggcacagcatcaagaagaacctgatcggagccctgctgttcgacagcggcgaaacagccgaggccacccggctgaagagaaccgccagaagaagatacaccagacggaagaaccggatctgctatctgcaagagatcttcagcaacgagatggccaaggtggacgacagcttcttccacagactggaagagtccttcctggtggaagaggacaagaagcacgagagacaccccatcttcggcaacatcgtggacgaggtggcctaccacgagaagtaccccaccatctaccacctgagaaagaaactggtggacagcaccgacaaggccgacctgagactgatctacctggccctggcccacatgatcaagttcagaggccacttcctgatcgagggcgacctgaaccccgacaacagcgacgtggacaagctgttcatccagctggtgcagacctacaaccagctgttcgaggaaaaccccatcaacgccagcggcgtggacgccaaggctatcctgtctgccagactgagcaagagcagaaggctggaaaatctgatcgcccagctgcccggcgagaagaagaacggcctgttcggcaacctgattgccctgagcctgggcctgacccccaacttcaagagcaacttcgacctggccgaggatgccaaactgcagctgagcaaggacacctacgacgacgacctggacaacctgctggcccagatcggcgaccagtacgccgacctgttcctggccgccaagaacctgtctgacgccatcctgctgagcgacatcctgagagtgaacaccgagatcaccaaggcccccctgagcgcctctatgatcaagagatacgacgagcaccaccaggacctgaccctgctgaaagctctcgtgcggcagcagctgcctgagaagtacaaagaaatcttcttcgaccagagcaagaacggctacgccggctacatcgatggcggcgctagccaggaagagttctacaagttcatcaagcccatcctggaaaagatggacggcaccgaggaactgctcgtgaagctgaacagagaggacctgctgagaaagcagagaaccttcgacaacggcagcatcccccaccagatccacctgggagagctgcacgctatcctgagaaggcaggaagatttttacccattcctgaaggacaaccgggaaaagatcgagaagatcctgaccttcaggatcccctactacgtgggccccctggccagaggcaacagcagattcgcctggatgaccagaaagagcgaggaaaccatcaccccctggaacttcgaggaagtggtggacaagggcgccagcgcccagagcttcatcgagagaatgacaaacttcgataagaacctgcccaacgagaaggtgctgcccaagcacagcctgctgtacgagtacttcaccgtgtacaacgagctgaccaaagtgaaatacgtgaccgagggaatgagaaagcccgccttcctgagcggcgagcagaaaaaggccatcgtggacctgctgttcaagaccaacagaaaagtgaccgtgaagcagctgaaagaggactacttcaagaaaatcgagtgcttcgactccgtggaaatctccggcgtggaagatagattcaacgcctccctgggcacataccacgatctgctgaaaattatcaaggacaaggacttcctggataacgaagagaacgaggacattctggaagatatcgtgctgaccctgacactgtttgaggaccgcgagatgatcgaggaaaggctgaaaacctacgctcacctgttcgacgacaaagtgatgaagcagctgaagagaaggcggtacaccggctggggcaggctgagcagaaagctgatcaacggcatcagagacaagcagagcggcaagacaatcctggatttcctgaagtccgacggcttcgccaaccggaacttcatgcagctgatccacgacgacagcctgacattcaaagaggacatccagaaagcccaggtgtccggccagggcgactctctgcacgagcatatcgctaacctggccggcagccccgctatcaagaagggcatcctgcagacagtgaaggtggtggacgagctcgtgaaagtgatgggcagacacaagcccgagaacatcgtgatcgagatggctagagagaaccagaccacccagaagggacagaagaactcccgcgagaggatgaagagaatcgaagagggcatcaaagagctgggcagccagatcctgaaagaacaccccgtggaaaacacccagctgcagaacgagaagctgtacctgtactacctgcagaatggccgggatatgtacgtggaccaggaactggacatcaacagactgtccgactacgatgtggaccatatcgtgcctcagagctttctgaaggacgactccatcgataacaaagtgctgactcggagcgacaagaacagaggcaagagcgacaacgtgccctccgaagaggtcgtgaagaagatgaagaactactggcgacagctgctgaacgccaagctgattacccagaggaagttcgataacctgaccaaggccgagagaggcggcctgagcgagctggataaggccggcttcatcaagaggcagctggtggaaaccagacagatcacaaagcacgtggcacagatcctggactcccggatgaacactaagtacgacgaaaacgataagctgatccgggaagtgaaagtgatcaccctgaagtccaagctggtgtccgatttccggaaggatttccagttttacaaagtgcgcgagatcaacaactaccaccacgcccacgacgcctacctgaacgccgtcgtgggaaccgccctgatcaaaaagtaccctaagctggaaagcgagttcgtgtacggcgactacaaggtgtacgacgtgcggaagatgatcgccaagagcgagcaggaaatcggcaaggctaccgccaagtacttcttctacagcaacatcatgaactttttcaagaccgaaatcaccctggccaacggcgagatcagaaagcgccctctgatcgagacaaacggcgaaaccggggagatcgtgtgggataagggcagagacttcgccacagtgcgaaaggtgctgagcatgccccaagtgaatatcgtgaaaaagaccgaggtgcagacaggcggcttcagcaaagagtctatcctgcccaagaggaacagcgacaagctgatcgccagaaagaaggactgggaccccaagaagtacggcggcttcgacagccctaccgtggcctactctgtgctggtggtggctaaggtggaaaagggcaagtccaagaaactgaagagtgtgaaagagctgctggggatcaccatcatggaaagaagcagctttgagaagaaccctatcgactttctggaagccaagggctacaaagaagtgaaaaaggacctgatcatcaagctgcctaagtactccctgttcgagctggaaaacggcagaaagagaatgctggcctctgccggcgaactgcagaagggaaacgagctggccctgcctagcaaatatgtgaacttcctgtacctggcctcccactatgagaagctgaagggcagccctgaggacaacgaacagaaacagctgtttgtggaacagcataagcactacctggacgagatcatcgagcagatcagcgagttctccaagagagtgatcctggccgacgccaatctggacaaggtgctgtctgcctacaacaagcacagggacaagcctatcagagagcaggccgagaatatcatccacctgttcaccctgacaaacctgggcgctcctgccgccttcaagtactttgacaccaccatcgaccggaagaggtacaccagcaccaaagaggtgctggacgccaccctgatccaccagagcatcaccggcctgtacgagacaagaatcgacctgtctcagctgggaggcgacaagagacctgccgccactaagaaggccggacaggccaaaaagaagaagtgagcggccgcttaatta

SEQ ID NO: 11 - protein, 1379 aa, synthetic construct
MDKKYSIGLDIGTNSVGWAVITDEYKVPSKKFKVLGNTDRHSIKKNLIGALLFDSGETAEATRLKRTARRRYTRRKNRICYLQEIFSNEMAKVDDSFFHRLEESFLVEEDKKHERHPIFGNIVDEVAYHEKYPTIYHLRKKLVDSTDKADLRLIYLALAHMIKFRGHFLIEGDLNPDNSDVDKLFIQLVQTYNQLFEENPINASGVDAKAILSARLSKSRRLENLIAQLPGEKKNGLFGNLIALSLGLTPNFKSNFDLAEDAKLQLSKDTYDDDLDNLLAQIGDQYADLFLAAKNLSDAILLSDILRVNTEITKAPLSASMIKRYDEHHQDLTLLKALVRQQLPEKYKEIFFDQSKNGYAGYIDGGASQEEFYKFIKPILEKMDGTEELLVKLNREDLLRKQRTFDNGSIPHQIHLGELHAILRRQEDFYPFLKDNREKIEKILTFRIPYYVGPLARGNSRFAWMTRKSEETITPWNFEEVVDKGASAQSFIERMTNFDKNLPNEKVLPKHSLLYEYFTVYNELTKVKYVTEGMRKPAFLSGEQKKAIVDLLFKTNRKVTVKQLKEDYFKKIECFDSVEISGVEDRFNASLGTYHDLLKIIKDKDFLDNEENEDILEDIVLTLTLFEDREMIEERLKTYAHLFDDKVMKQLKRRRYTGWGRLSRKLINGIRDKQSGKTILDFLKSDGFANRNFMQLIHDDSLTFKEDIQKAQVSGQGDSLHEHIANLAGSPAIKKGILQTVKVVDELVKVMGRHKPENIVIEMARENQTTQKGQKNSRERMKRIEEGIKELGSQILKEHPVENTQLQNEKLYLYYLQNGRDMYVDQELDINRLSDYDVDHIVPQSFLKDDSIDNKVLTRSDKNRGKSDNVPSEEVVKKMKNYWRQLLNAKLITQRKFDNLTKAERGGLSELDKAGFIKRQLVETRQITKHVAQILDSRMNTKYDENDKLIREVKVITLKSKLVSDFRKDFQFYKVREINNYHHAHDAYLNAVVGTALIKKYPKLESEFVYGDYKVYDVRKMIAKSEQEIGKATAKYFFYSNIMNFFKTEITLANGEIRKRPLIETNGETGEIVWDKGRDFATVRKVLSMPQVNIVKKTEVQTGGFSKESILPKRNSDKLIARKKDWDPKKYGGFDSPTVAYSVLVVAKVEKGKSKKLKSVKELLGITIMERSSFEKNPIDFLEAKGYKEVKKDLIIKLPKYSLFELENGRKRMLASAGELQKGNELALPSKYVNFLYLASHYEKLKGSPEDNEQKQLFVEQHKHYLDEIIEQISEFSKRVILADANLDKVLSAYNKHRDKPIREQAENIIHLFTLTNLGAPAAFKYFDTTIDRKRYTSTKEVLDATLIHQSITGLYETRIDLSQLGGDGGGSPKKKRKV

SEQ ID NO: 12 - RNA, 4514 nt, synthetic construct
  source 1..4514: mol_type = other RNA
gggtcccgcagtcggcgtccagcggctctgcttgttcgtgtgtgtgtcgttgcaggccttattcggatccatggataagaagtactcaatcgggctggatatcggaactaattccgtgggttgggcagtgatcacggatgaatacaaagtgccgtccaagaagttcaaggtcctggggaacaccgatagacacagcatcaagaaaaatctcatcggagccctgctgtttgactccggcgaaaccgcagaagcgacccggctcaaacgtaccgcgaggcgacgctacacccggcggaagaatcgcatctgctatctgcaagagatcttttcgaacgaaatggcaaaggtcgacgacagcttcttccaccgcctggaagaatctttcctggtggaggaggacaagaagcatgaacggcatcctatctttggaaacatcgtcgacgaagtggcgtaccacgaaaagtacccgaccatctaccatctgcggaagaagttggttgactcaactgacaaggccgacctcagattgatctacttggccctcgcccatatgatcaaattccgcggacacttcctgatcgaaggcgatctgaaccctgataactccgacgtggataagcttttcattcaactggtgcagacctacaaccaactgttcgaagaaaacccaatcaatgctagcggcgtcgatgccaaggccatcctgtccgcccggctgtcgaagtcgcggcgcctcgaaaacctgatcgcacagctgccgggagagaaaaagaacggacttttcggcaacttgatcgctctctcactgggactcactcccaatttcaagtccaattttgacctggccgaggacgcgaagctgcaactctcaaaggacacctacgacgacgacttggacaatttgctggcacaaattggcgatcagtacgcggatctgttccttgccgctaagaacctttcggacgcaatcttgctgtccgatatcctgcgcgtgaacaccgaaataaccaaagcgccgcttagcgcctcgatgattaagcggtacgacgagcatcaccaggatctcacgctgctcaaagcgctcgtgagacagcaactgcctgaaaagtacaaggagatcttcttcgaccagtccaagaatgggtacgcagggtacatcgatggaggcgctagccaggaagagttctataagttcatcaagccaatcctggaaaagatggacggaaccgaagaactgctggtcaagctgaacagggaggatctgctccggaaacagagaacctttgacaacggatccattccccaccagatccatctgggtgagctgcacgccatcttgcggcgccaggaggacttttacccattcctcaaggacaaccgggaaaagatcgagaaaattctgacgttccgcatcccgtattacgtgggcccactggcgcgcggcaattcgcgcttcgcgtggatgactagaaaatcagaggaaaccatcactccttggaatttcgaggaagttgtggataagggagcttcggcacaaagcttcatcgaacgaatgaccaacttcgacaagaatctcccaaacgagaaggtgcttcctaagcacagcctcctttacgaatacttcactgtctacaacgaactgactaaagtgaaatacgttactgaaggaatgaggaagccggcctttctgtccggagaacagaagaaagcaattgtcgatctgctgttcaagaccaaccgcaaggtgaccgtcaagcagcttaaagaggactacttcaagaagatcgagtgtttcgactcagtggaaatcagcggggtggaggacagattcaacgcttcgctgggaacctatcatgatctcctgaagatcatcaaggacaaggacttccttgacaacgaggagaacgaggacatcctggaagatatcgtcctgaccttgacccttttcgaggatcgcgagatgatcgaggagaggcttaagacctacgctcatctcttcgacgataaggtcatgaaacaactcaagcgccgccggtacactggttggggccgcctctcccgcaagctgatcaacggtattcgcgataaacagagcggtaaaactatcctggatttcctcaaatcggatggcttcgctaatcgtaacttcatgcaattgatccacgacgacagcctgacctttaaggaggacatccaaaaagcacaagtgtccggacagggagactcactccatgaacacatcgcgaatctggccggttcgccggcgattaagaagggaattctgcaaactgtgaaggtggtcgacgagctggtgaaggtcatgggacggcacaaaccggagaatatcgtgattgaaatggcccgagaaaaccagactacccagaagggccagaaaaactcccgcgaaaggatgaagcggatcgaagaaggaatcaaggagctgggcagccagatcctgaaagagcacccggtggaaaacacgcagctgcagaacgagaagctctacctgtactatttgcaaaatggacgggacatgtacgtggaccaagagctggacatcaatcggttgtctgattacgacgtggaccacatcgttccacagtcctttctgaaggatgactcgatcgataacaaggtgttgactcgcagcgacaagaacagagggaagtcagataatgtgccatcggaggaggtcgtgaagaagatgaagaattactggcggcagctcctgaatgcgaagctgattacccagagaaagtttgacaatctcactaaagccgagcgcggcggactctcagagctggataaggctggattcatcaaacggcagctggtcgagactcggcagattaccaagcacgtggcgcagatcttggactcccgcatgaacactaaatacgacgagaacgataagctcatccgggaagtgaaggtgattaccctgaaaagcaaacttgtgtcggactttcggaaggactttcagttttacaaagtgagagaaatcaacaactaccatcacgcgcatgacgcatacctcaacgctgtggtcggtaccgccctgatcaaaaagtaccctaaacttgaatcggagtttgtgtacggagactacaaggtctacgacgtgaggaagatgatagccaagtccgaacaggaaatcgggaaagcaactgcgaaatacttcttttactcaaacatcatgaactttttcaagactgaaattacgctggccaatggagaaatcaggaagaggccactgatcgaaactaacggagaaacgggcgaaatcgtgtgggacaagggcagggacttcgcaactgttcgcaaagtgctctctatgccgcaagtcaatattgtgaagaaaaccgaagtgcaaaccggcggattttcaaaggaatcgatcctcccaaagagaaatagcgacaagctcattgcacgcaagaaagactgggacccgaagaagtacggaggattcgattcgccgactgtcgcatactccgtcctcgtggtggccaaggtggagaagggaaagagcaaaaagctcaaatccgtcaaagagctgctggggattaccatcatggaacgatcctcgttcgagaagaacccgattgatttcctcgaggcgaagggttacaaggaggtgaagaaggatctgatcatcaaactccccaagtactcactgttcgaactggaaaatggtcggaagcgcatgctggcttcggccggagaactccaaaaaggaaatgagctggccttgcctagcaagtacgtcaacttcctctatcttgcttcgcactacgaaaaactcaaagggtcaccggaagataacgaacagaagcagcttttcgtggagcagcacaagcattatctggatgaaatcatcgaacaaatctccgagttttcaaagcgcgtgatcctcgccgacgccaacctcgacaaagtcctgtcggcctacaataagcatagagataagccgatcagagaacaggccgagaacattatccacttgttcaccctgactaacctgggagccccagccgccttcaagtacttcgatactactatcgatcgcaaaagatacacgtccaccaaggaagttctggacgcgaccctgatccaccaaagcatcactggactctacgaaactaggatcgatctgtcgcagctgggtggcgatggcggtggatctccgaaaaagaagagaaaggtgtaatgagctagccatcacatttaaaagcatctcagcctaccatgagaataagagaaagaaaatgaagatcaatagcttattcatctctttttctttttcgttggtgtaaagccaacaccctgtctaaaaaacataaatttctttaatcattttgcctcttttctctgtgcttcaattaataaaaaatggaaagaacctcgagaaaaaaaaaaaaaaaaaaaaaaaaaaaaaaaaaaaaaaaaaaaaaaaaaaaaaaaaaaaaaaaaaaaaaaaaaaaaaaaaaaaaaaaaaaaaaaaaaaaatctag

SEQ ID NO: 13 - protein, 7 aa, synthetic construct
PKKKRKV

SEQ ID NO: 14 - protein, 7 aa, synthetic construct
PKKKRRV

SEQ ID NO: 15 - protein, 16 aa, synthetic construct
KRPAATKKAGQAKKKK

SEQ ID NO: 16 - RNA, 16 nt, synthetic construct
  source 1..16: mol_type = other RNA
gttttagagctatgct

SEQ ID NO: 17 - RNA, 22 nt, synthetic construct
  source 1..22: mol_type = other RNA
gttttagagctatgctgttttg

SEQ ID NO: 18 - RNA, 67 nt, synthetic construct
  source 1..67: mol_type = other RNA
agcatagcaagttaaaataaggctagtccgttatcaacttgaaaaagtggcaccgagtcggtgcttt

SEQ ID NO: 19 - RNA, 72 nt, synthetic construct
  source 1..72: mol_type = other RNA
aaacagcatagcaagttaaaataaggctagtccgttatcaacttgaaaaagtggcaccgagtcggtgctttt

SEQ ID NO: 20 - RNA, 82 nt, synthetic construct
  source 1..82: mol_type = other RNA
gttggaaccattcaaaacagcatagcaagttaaaataaggctagtccgttatcaacttgaaaaagtggcaccgagtcggtgc

SEQ ID NO: 21 - RNA, 77 nt, synthetic construct
  source 1..77: mol_type = other RNA
gttttagagctagaaatagcaagttaaaataaggctagtccgttatcaacttgaaaaagtggcaccgagtcggtgct

SEQ ID NO: 22 - RNA, 82 nt, synthetic construct; identical to SEQ ID NO: 20
  source 1..82: mol_type = other RNA

SEQ ID NO: 23 - RNA, 76 nt, synthetic construct
  source 1..76: mol_type = other RNA
gttttagagctagaaatagcaagttaaaataaggctagtccgttatcaacttgaaaaagtggcaccgagtcggtgc

SEQ ID NO: 24 - RNA, 86 nt, synthetic construct
  source 1..86: mol_type = other RNA
gtttaagagctatgctggaaacagcatagcaagtttaaataaggctagtccgttatcaacttgaaaaagtggcaccgagtcggtgc

SEQ ID NO: 25 - RNA, 83 nt, synthetic construct
  source 1..83: mol_type = other RNA
gttttagagctagaaatagcaagttaaaataaggctagtccgttatcaacttgaaaaagtggcaccgagtcggtgcttttttt

SEQ ID NO: 26 - RNA, 80 nt, synthetic construct
  source 1..80: mol_type = other RNA
gttttagagctagaaatagcaagttaaaataaggctagtccgttatcaacttgaaaaagtggcaccgagtcggtgctttt

SEQ ID NO: 27 - RNA, 92 nt, synthetic construct
  source 1..92: mol_type = other RNA
gtttaagagctatgctggaaacagcatagcaagtttaaataaggctagtccgttatcaacttgaaaaagtggcaccgagtcggtgctttttt

SEQ ID NO: 28 - RNA, 68 nt, synthetic construct
  source 1..68: mol_type = other RNA
gttttagagctagaaatagcaagttaaaataaggctagtccgttatcaacttggcaccgagtcggtgc

SEQ ID NO: 29 - RNA, 100 nt, synthetic construct
  source 1..100: mol_type = other RNA
  misc_difference 1..20: note = n = a, c, g, or t/u
nnnnnnnnnnnnnnnnnnnngttttagagctagaaatagcaagttaaaataaggctagtccgttatcaacttgaaaaagtggcaccgagtcggtgctttt

SEQ ID NO: 30 - RNA, 20 nt, synthetic construct
  source 1..20: mol_type = other RNA
gagcaacctcactcttgtct

SEQ ID NO: 31 - RNA, 20 nt, synthetic construct
  source 1..20: mol_type = other RNA
atgcatttgtttcaaaatat

SEQ ID NO: 32 - RNA, 20 nt, synthetic construct
  source 1..20: mol_type = other RNA
tgcatttgtttcaaaatatt

SEQ ID NO: 33 - RNA, 20 nt, synthetic construct
  source 1..20: mol_type = other RNA
atttatgagatcaacagcac

SEQ ID NO: 34 - RNA, 20 nt, synthetic construct
  source 1..20: mol_type = other RNA
gatcaacagcacaggttttg

SEQ ID NO: 35 - RNA, 20 nt, synthetic construct
  source 1..20: mol_type = other RNA
ttaaataaagcatagtgcaa

SEQ ID NO: 36 - RNA, 20 nt, synthetic construct
  source 1..20: mol_type = other RNA
taaagcatagtgcaatggat

SEQ ID NO: 37 - RNA, 20 nt, synthetic construct
  source 1..20: mol_type = other RNA
tagtgcaatggataggtctt

SEQ ID NO: 38 - RNA, 20 nt, synthetic construct
  source 1..20: mol_type = other RNA
tactaaaactttattttact

SEQ ID NO: 39 - RNA, 20 nt, synthetic construct
  source 1..20: mol_type = other RNA
aaagttgaacaatagaaaaa

SEQ ID NO: 40 - RNA, 20 nt, synthetic construct
  source 1..20: mol_type = other RNA
aatgcataatctaagtcaaa

SEQ ID NO: 41 - RNA, 20 nt, synthetic construct
  source 1..20: mol_type = other RNA
taataaaattcaaacatcct

SEQ ID NO: 42 - RNA, 20 nt, synthetic construct
  source 1..20: mol_type = other RNA
gcatctttaaagaattattt

SEQ ID NO: 43 - RNA, 20 nt, synthetic construct
  source 1..20: mol_type = other RNA
tttggcatttatttctaaaa

SEQ ID NO: 44 - RNA, 20 nt, synthetic construct
  source 1..20: mol_type = other RNA
tgtatttgtgaagtcttaca

SEQ ID NO: 45 - RNA, 20 nt, synthetic construct
  source 1..20: mol_type = other RNA
tcctaggtaaaaaaaaaaaa

SEQ ID NO: 46 - RNA, 20 nt, synthetic construct
  source 1..20: mol_type = other RNA
taattttcttttgcgcacta

SEQ ID NO: 47 - RNA, 20 nt, synthetic construct
  source 1..20: mol_type = other RNA
tgactgaaacttcacagaat

SEQ ID NO: 48 - RNA, 20 nt, synthetic construct
  source 1..20: mol_type = other RNA
gactgaaacttcacagaata

SEQ ID NO: 49 - RNA, 20 nt, synthetic construct
  source 1..20: mol_type = other RNA
ttcattttagtctgtcttct

SEQ ID NO: 50 - RNA, 20 nt, synthetic construct
  source 1..20: mol_type = other RNA
attatctaagtttgaatata

SEQ ID NO: 51 - RNA, 20 nt, synthetic construct
  source 1..20: mol_type = other RNA
aatttttaaaatagtattct

SEQ ID NO: 52 - RNA, 20 nt, synthetic construct
  source 1..20: mol_type = other RNA
tgaattattcttctgtttaa

SEQ ID NO: 53 - RNA, 20 nt, synthetic construct
  source 1..20: mol_type = other RNA
atcatcctgagtttttctgt

SEQ ID NO: 54 - RNA, 20 nt, synthetic construct
  source 1..20: mol_type = other RNA
ttactaaaactttattttac

SEQ ID NO: 55 - RNA, 20 nt, synthetic construct
  source 1..20: mol_type = other RNA
acctttttttttttttacct

SEQ ID NO: 56 - RNA, 20 nt, synthetic construct
  source 1..20: mol_type = other RNA
agtgcaatggataggtcttt

SEQ ID NO: 57 - RNA, 20 nt, synthetic construct
  source 1..20: mol_type = other RNA
tgattcctacagaaaaactc

SEQ ID NO: 58 - RNA, 20 nt, synthetic construct
  source 1..20: mol_type = other RNA
tgggcaagggaagaaaaaaa

SEQ ID NO: 59 - RNA, 20 nt, synthetic construct
  source 1..20: mol_type = other RNA
cctcactcttgtctgggcaa

SEQ ID NO: 60 - RNA, 20 nt, synthetic construct
  source 1..20: mol_type = other RNA
acctcactcttgtctgggca

SEQ ID NO: 61 - RNA, 20 nt, synthetic construct
  source 1..20: mol_type = other RNA
tgagcaacctcactcttgtc

SEQ ID NO: 62 - RNA, 100 nt, synthetic construct
  source 1..100: mol_type = other RNA
gagcaacctcactcttgtctgttttagagctagaaatagcaagttaaaataaggctagtccgttatcaacttgaaaaagtggcaccgagtcggtgctttt

SEQ ID NO: 63 - RNA, 100 nt, synthetic construct
  source 1..100: mol_type = other RNA
atgcatttgtttcaaaatatgttttagagctagaaatagcaagttaaaataaggctagtccgttatcaacttgaaaaagtggcaccgagtcggtgctttt

SEQ ID NO: 64 - RNA, 100 nt, synthetic construct
  source 1..100: mol_type = other RNA
tgcatttgtttcaaaatattgttttagagctagaaatagcaagttaaaataaggctagtccgttatcaacttgaaaaagtggcaccgagtcggtgctttt

SEQ ID NO: 65 - RNA, 100 nt, synthetic construct
  source 1..100: mol_type = other RNA
atttatgagatcaacagcacgttttagagctagaaatagcaagttaaaataaggctagtccgttatcaacttgaaaaagtggcaccgagtcggtgctttt

SEQ ID NO: 66 - RNA, 100 nt, synthetic construct
  source 1..100: mol_type = other RNA
gatcaacagcacaggttttggttttagagctagaaatagcaagttaaaataaggctagtccgttatcaacttgaaaaagtggcaccgagtcggtgctttt

SEQ ID NO: 67 - RNA, 100 nt, synthetic construct
  source 1..100: mol_type = other RNA
ttaaataaagcatagtgcaagttttagagctagaaatagcaagttaaaataaggctagtccgttatcaacttgaaaaagtggcaccgagtcggtgctttt

SEQ ID NO: 68 - RNA, 100 nt, synthetic construct
  source 1..100: mol_type = other RNA
taaagcatagtgcaatggatgttttagagctagaaatagcaagttaaaataaggctagtccgttatcaacttgaaaaagtggcaccgagtcggtgctttt

SEQ ID NO: 69 - RNA, 100 nt, synthetic construct
  source 1..100: mol_type = other RNA
tagtgcaatggataggtcttgttttagagctagaaatagcaagttaaaataaggctagtccgttatcaacttgaaaaagtggcaccgagtcggtgctttt

SEQ ID NO: 70 - RNA, 100 nt, synthetic construct
  source 1..100: mol_type = other RNA
tactaaaactttattttactgttttagagctagaaatagcaagttaaaataaggctagtccgttatcaacttgaaaaagtggcaccgagtcggtgctttt

SEQ ID NO: 71 - RNA, 100 nt, synthetic construct
  source 1..100: mol_type = other RNA
aaagttgaacaatagaaaaagttttagagctagaaatagcaagttaaaataaggctagtccgttatcaacttgaaaaagtggcaccgagtcggtgctttt

SEQ ID NO: 72 - RNA, 100 nt, synthetic construct
  source 1..100: mol_type = other RNA
aatgcataatctaagtcaaagttttagagctagaaatagcaagttaaaataaggctagtccgttatcaacttgaaaaagtggcaccgagtcggtgctttt

SEQ ID NO: 73 - RNA, 100 nt, synthetic construct
  source 1..100: mol_type = other RNA
taataaaattcaaacatcctgttttagagctagaaatagcaagttaaaataaggctagtccgttatcaacttgaaaaagtggcaccgagtcggtgctttt

SEQ ID NO: 74 - RNA, 100 nt, synthetic construct
  source 1..100: mol_type = other RNA
gcatctttaaagaattatttgttttagagctagaaatagcaagttaaaataaggctagtccgttatcaacttgaaaaagtggcaccgagtcggtgctttt

SEQ ID NO: 75 - RNA, 100 nt, synthetic construct
  source 1..100: mol_type = other RNA
tttggcatttatttctaaaagttttagagctagaaatagcaagttaaaataaggctagtccgttatcaacttgaaaaagtggcaccgagtcggtgctttt

SEQ ID NO: 76 - RNA, 100 nt, synthetic construct
  source 1..100: mol_type = other RNA
tgtatttgtgaagtcttacagttttagagctagaaatagcaagttaaaataaggctagtccgttatcaacttgaaaaagtggcaccgagtcggtgctttt

SEQ ID NO: 77 - RNA, 100 nt, synthetic construct
  source 1..100: mol_type = other RNA
tcctaggtaaaaaaaaaaaagttttagagctagaaatagcaagttaaaataaggctagtccgttatcaacttgaaaaagtggcaccgagtcggtgctttt

SEQ ID NO: 78 - RNA, 100 nt, synthetic construct
  source 1..100: mol_type = other RNA
taattttcttttgcgcactagttttagagctagaaatagcaagttaaaataaggctagtccgttatcaacttgaaaaagtggcaccgagtcggtgctttt

SEQ ID NO: 79 - RNA, 100 nt, synthetic construct
  source 1..100: mol_type = other RNA
tgactgaaacttcacagaatgttttagagctagaaatagcaagttaaaataaggctagtccgttatcaacttgaaaaagtggcaccgagtcggtgctttt

SEQ ID NO: 80 - RNA, 100 nt, synthetic construct
  source 1..100: mol_type = other RNA
gactgaaacttcacagaatagttttagagctagaaatagcaagttaaaataaggctagtccgttatcaacttgaaaaagtggcaccgagtcggtgctttt

SEQ ID NO: 81 - RNA, 100 nt, synthetic construct
  source 1..100: mol_type = other RNA
ttcattttagtctgtcttctgttttagagctagaaatagcaagttaaaataaggctagtccgttatcaacttgaaaaagtggcaccgagtcggtgctttt

SEQ ID NO: 82 - RNA, 100 nt, synthetic construct
  source 1..100: mol_type = other RNA
attatctaagtttgaatatagttttagagctagaaatagcaagttaaaataaggctagtccgttatcaacttgaaaaagtggcaccgagtcggtgctttt

SEQ ID NO: 83 - RNA, 100 nt, synthetic construct
  source 1..100: mol_type = other RNA
aatttttaaaatagtattctgttttagagctagaaatagcaagttaaaataaggctagtccgttatcaacttgaaaaagtggcaccgagtcggtgctttt

SEQ ID NO: 84 - RNA, 100 nt, synthetic construct
  source 1..100: mol_type = other RNA
tgaattattcttctgtttaagttttagagctagaaatagcaagttaaaataaggctagtccgttatcaacttgaaaaagtggcaccgagtcggtgctttt

SEQ ID NO: 85 - RNA, 100 nt, synthetic construct
  source 1..100: mol_type = other RNA
atcatcctgagtttttctgtgttttagagctagaaatagcaagttaaaataaggctagtccgttatcaacttgaaaaagtggcaccgagtcggtgctttt

SEQ ID NO: 86 - RNA, 100 nt, synthetic construct
  source 1..100: mol_type = other RNA
ttactaaaactttattttacgttttagagctagaaatagcaagttaaaataaggctagtccgttatcaacttgaaaaagtggcaccgagtcggtgctttt

SEQ ID NO: 87 - RNA, 100 nt, synthetic construct
  source 1..100: mol_type = other RNA
acctttttttttttttacctgttttagagctagaaatagcaagttaaaataaggctagtccgttatcaacttgaaaaagtggcaccgagtcggtgctttt

SEQ ID NO: 88 - RNA, 100 nt, synthetic construct
  source 1..100: mol_type = other RNA
agtgcaatggataggtctttgttttagagctagaaatagcaagttaaaataaggctagtccgttatcaacttgaaaaagtggcaccgagtcggtgctttt

SEQ ID NO: 89 - RNA, 100 nt, synthetic construct
  source 1..100: mol_type = other RNA
tgattcctacagaaaaactcgttttagagctagaaatagcaagttaaaataaggctagtccgttatcaacttgaaaaagtggcaccgagtcggtgctttt

SEQ ID NO: 90 - RNA, 100 nt, synthetic construct
  source 1..100: mol_type = other RNA
tgggcaagggaagaaaaaaagttttagagctagaaatagcaagttaaaataaggctagtccgttatcaacttgaaaaagtggcaccgagtcggtgctttt

SEQ ID NO: 91 - RNA, 100 nt, synthetic construct
  source 1..100: mol_type = other RNA
cctcactcttgtctgggcaagttttagagctagaaatagcaagttaaaataaggctagtccgttatcaacttgaaaaagtggcaccgagtcggtgctttt

SEQ ID NO: 92 - RNA, 100 nt, synthetic construct
  source 1..100: mol_type = other RNA
acctcactcttgtctgggcagttttagagctagaaatagcaagttaaaataaggctagtccgttatcaacttgaaaaagtggcaccgagtcggtgctttt

SEQ ID NO: 93 - RNA, 100 nt, synthetic construct
  source 1..100: mol_type = other RNA
tgagcaacctcactcttgtcgttttagagctagaaatagcaagttaaaataaggctagtccgttatcaacttgaaaaagtggcaccgagtcggtgctttt

SEQ ID NO: 94 - RNA, 100 nt, synthetic construct; identical to SEQ ID NO: 62
  source 1..100: mol_type = other RNA

SEQ ID NO: 95 - RNA, 100 nt, synthetic construct; identical to SEQ ID NO: 63
  source 1..100: mol_type = other RNA

SEQ ID NO: 96 - RNA, 100 nt, synthetic construct; identical to SEQ ID NO: 64
  source 1..100: mol_type = other RNA

SEQ ID NO: 97 - RNA, 100 nt, synthetic construct; identical to SEQ ID NO: 65
  source 1..100: mol_type = other RNA

SEQ ID NO: 98 - RNA, 100 nt, synthetic construct; identical to SEQ ID NO: 66
  source 1..100: mol_type = other RNA

SEQ ID NO: 99 - RNA, 100 nt, synthetic construct; identical to SEQ ID NO: 67
  source 1..100: mol_type = other RNA

SEQ ID NO: 100 - RNA, 100 nt, synthetic construct; identical to SEQ ID NO: 68
  source 1..100: mol_type = other RNA

SEQ ID NO: 101 - RNA, 100 nt, synthetic construct; identical to SEQ ID NO: 69
  source 1..100: mol_type = other RNA

SEQ ID NO: 102 - RNA, 100 nt, synthetic construct; identical to SEQ ID NO: 70
  source 1..100: mol_type = other RNA

SEQ ID NO: 103 - RNA, 100 nt, synthetic construct; identical to SEQ ID NO: 71
  source 1..100: mol_type = other RNA

SEQ ID NO: 104 - RNA, 100 nt, synthetic construct; identical to SEQ ID NO: 72
  source 1..100: mol_type = other RNA

SEQ ID NO: 105 - RNA, 100 nt, synthetic construct; identical to SEQ ID NO: 73
  source 1..100: mol_type = other RNA

SEQ ID NO: 106 - RNA, 100 nt, synthetic construct; identical to SEQ ID NO: 74
  source 1..100: mol_type = other RNA

SEQ ID NO: 107 - RNA, 100 nt, synthetic construct; identical to SEQ ID NO: 75
  source 1..100: mol_type = other RNA

SEQ ID NO: 108 - RNA, 100 nt, synthetic construct; identical to SEQ ID NO: 76
  source 1..100: mol_type = other RNA

SEQ ID NO: 109 - RNA, 100 nt, synthetic construct; identical to SEQ ID NO: 77
  source 1..100: mol_type = other RNA

SEQ ID NO: 110 - RNA, 100 nt, synthetic construct; identical to SEQ ID NO: 78
  source 1..100: mol_type = other RNA

SEQ ID NO: 111 - RNA, 100 nt, synthetic construct; identical to SEQ ID NO: 79
  source 1..100: mol_type = other RNA

SEQ ID NO: 112 - RNA, 100 nt, synthetic construct; identical to SEQ ID NO: 80
  source 1..100: mol_type = other RNA

SEQ ID NO: 113 - RNA, 100 nt, synthetic construct; identical to SEQ ID NO: 81
  source 1..100: mol_type = other RNA

SEQ ID NO: 114 - RNA, 100 nt, synthetic construct; identical to SEQ ID NO: 82
  source 1..100: mol_type = other RNA

SEQ ID NO: 115 - RNA, 100 nt, synthetic construct; identical to SEQ ID NO: 83
  source 1..100: mol_type = other RNA

SEQ ID NO: 116 - RNA, 100 nt, synthetic construct; identical to SEQ ID NO: 84
  source 1..100: mol_type = other RNA

SEQ ID NO: 117 - RNA, 100 nt, synthetic construct; identical to SEQ ID NO: 85
  source 1..100: mol_type = other RNA

SEQ ID NO: 118 - RNA, 100 nt, synthetic construct; identical to SEQ ID NO: 86
  source 1..100: mol_type = other RNA

SEQ ID NO: 119 - RNA, 100 nt, synthetic construct; identical to SEQ ID NO: 87
  source 1..100: mol_type = other RNA

SEQ ID NO: 120 - RNA, 100 nt, synthetic construct; identical to SEQ ID NO: 88
  source 1..100: mol_type = other RNA

SEQ ID NO: 121 - RNA, 100 nt, synthetic construct; identical to SEQ ID NO: 89
  source 1..100: mol_type = other RNA

SEQ ID NO: 122 - RNA, 100 nt, synthetic construct; identical to SEQ ID NO: 90
  source 1..100: mol_type = other RNA

SEQ ID NO: 123 - RNA, 100 nt, synthetic construct; identical to SEQ ID NO: 91
  source 1..100: mol_type = other RNA

SEQ ID NO: 124 - RNA, 100 nt, synthetic construct; identical to SEQ ID NO: 92
  source 1..100: mol_type = other RNA

SEQ ID NO: 125 - RNA, 100 nt, synthetic construct; identical to SEQ ID NO: 93
  source 1..100: mol_type = other RNA

SEQ ID NO: 126 - DNA, 20 bp, synthetic construct
  source 1..20: mol_type = other DNA
gagcaacctcactcttgtct

SEQ ID NO: 127 - DNA, 20 bp, synthetic construct
  source 1..20: mol_type = other DNA
atgcatttgtttcaaaatat

SEQ ID NO: 128 - DNA, 20 bp, synthetic construct
  source 1..20: mol_type = other DNA
tgcatttgtttcaaaatatt

SEQ ID NO: 129 - DNA, 20 bp, synthetic construct
  source 1..20: mol_type = other DNA
atttatgagatcaacagcac

SEQ ID NO: 130 - DNA, 20 bp, synthetic construct
  source 1..20: mol_type = other DNA
gatcaacagcacaggttttg

SEQ ID NO: 131 - DNA, 20 bp, synthetic construct
  source 1..20: mol_type = other DNA
ttaaataaagcatagtgcaa

SEQ ID NO: 132 - DNA, 20 bp, synthetic construct
  source 1..20: mol_type = other DNA
taaagcatagtgcaatggat

SEQ ID NO: 133 - DNA, 20 bp, synthetic construct
  source 1..20: mol_type = other DNA
tagtgcaatggataggtctt

SEQ ID NO: 134 - DNA, 20 bp, synthetic construct
  source 1..20: mol_type = other DNA
tactaaaactttattttact

SEQ ID NO: 135 - DNA, 20 bp, synthetic construct
  source 1..20: mol_type = other DNA
aaagttgaacaatagaaaaa

SEQ ID NO: 136 - DNA, 20 bp, synthetic construct
  source 1..20: mol_type = other DNA
aatgcataatctaagtcaaa

SEQ ID NO: 137 - DNA, 20 bp, synthetic construct
  source 1..20: mol_type = other DNA
taataaaattcaaacatcct

SEQ ID NO: 138 - DNA, 20 bp, synthetic construct
  source 1..20: mol_type = other DNA
gcatctttaaagaattattt

SEQ ID NO: 139 - DNA, 20 bp, synthetic construct
  source 1..20: mol_type = other DNA
tttggcatttatttctaaaa

SEQ ID NO: 140 - DNA, 20 bp, synthetic construct
  source 1..20: mol_type = other DNA
tgtatttgtgaagtcttaca

SEQ ID NO: 141 - DNA, 20 bp, synthetic construct
  source 1..20: mol_type = other DNA
tcctaggtaaaaaaaaaaaa

SEQ ID NO: 142 - DNA, 20 bp, synthetic construct
  source 1..20: mol_type = other DNA
taattttcttttgcgcacta

SEQ ID NO: 143 - DNA, 20 bp, synthetic construct
  source 1..20: mol_type = other DNA
tgactgaaacttcacagaat

SEQ ID NO: 144 - DNA, 20 bp, synthetic construct
  source 1..20: mol_type = other DNA
gactgaaacttcacagaata

SEQ ID NO: 145 - DNA, 20 bp, synthetic construct
  source 1..20: mol_type = other DNA
ttcattttagtctgtcttct

SEQ ID NO: 146 - DNA, 20 bp, synthetic construct
  source 1..20: mol_type = other DNA
attatctaagtttgaatata

SEQ ID NO: 147 - DNA, 20 bp, synthetic construct
  source 1..20: mol_type = other DNA
aatttttaaaatagtattct

SEQ ID NO: 148 - DNA, 20 bp, synthetic construct
  source 1..20: mol_type = other DNA
tgaattattcttctgtttaa

SEQ ID NO: 149 - DNA, 20 bp, synthetic construct
  source 1..20: mol_type = other DNA
atcatcctgagtttttctgt

SEQ ID NO: 150 - DNA, 20 bp, synthetic construct
  source 1..20: mol_type = other DNA
ttactaaaactttattttac

SEQ ID NO: 151 - DNA, 20 bp, synthetic construct
  source 1..20: mol_type = other DNA
acctttttttttttttacct

SEQ ID NO: 152 - DNA, 20 bp, synthetic construct
  source 1..20: mol_type = other DNA
agtgcaatggataggtcttt

SEQ ID NO: 153 - DNA, 20 bp, synthetic construct
  source 1..20: mol_type = other DNA
tgattcctacagaaaaactc

SEQ ID NO: 154 - DNA, 20 bp, synthetic construct
  source 1..20: mol_type = other DNA
tgggcaagggaagaaaaaaa

SEQ ID NO: 155 - DNA, 20 bp, synthetic construct
  source 1..20: mol_type = other DNA
cctcactcttgtctgggcaa

SEQ ID NO: 156 - DNA, 20 bp, synthetic construct
  source 1..20: mol_type = other DNA
acctcactcttgtctgggca

SEQ ID NO: 157 - DNA, 20 bp, synthetic construct
  source 1..20: mol_type = other DNA
tgagcaacctcactcttgtc

SEQ ID NO: 158 - DNA, 145 bp, synthetic construct
  source 1..145: mol_type = other DNA
ttggccactccctctctgcgcgctcgctcgctcactgaggccgggcgaccaaaggtcgcccgacgcccgggctttgcccgggcggcctcagtgagcgagcgagcgcgcagagagggagtggccaactccatcactaggggttcct

SEQ ID NO: 159 - DNA, 141 bp, synthetic construct
  source 1..141: mol_type = other DNA
cctgcaggcagctgcgcgctcgctcgctcactgaggccgcccgggcaaagcccgggcgtcgggcgacctttggtcgcccggcctcagtgagcgagcgagcgcgcagagagggagtggccaactccatcactaggggttcct

SEQ ID NO: 160 - DNA, 130 bp, synthetic construct
  source 1..130: mol_type = other DNA
ctgcgcgctcgctcgctcactgaggccgcccgggcaaagcccgggcgtcgggcgacctttggtcgcccggcctcagtgagcgagcgagcgcgcagagagggagtggccaactccatcactaggggttcct

SEQ ID NO: 161 - DNA, 131 bp, synthetic construct
  source 1..131: mol_type = other DNA
cagacatgataagatacattgatgagtttggacaaaccacaactagaatgcagtgaaaaaaatgctttatttgtgaaatttgtgatgctattgctttatttgtaaccattataagctgcaataaacaagtt

SEQ ID NO: 162 - DNA, 224 bp, synthetic construct
  source 1..224: mol_type = other DNA
ctgtgccttctagttgccagccatctgttgtttgcccctcccccttgccttccttgaccctggaaggtgccactcccactgtcctttcctaataaaatgaggaaattgcatcacattgtctgagtaggtgtcattctattctggggggtggggtggggcaggacagcaagggggaggattgggaagacaatagcaggcatgctggggatgcagtgggctctatg

SEQ ID NO: 163 - DNA, 100 bp, synthetic construct
  source 1..100: mol_type = other DNA
taggtcagtgaagagaagaacaaaaagcagcatattacagttagttgtcttcatcaatctttaaatatgttgtgtggtttttctctccctgtttccacag

SEQ ID NO: 164 - RNA, 20 nt, synthetic construct
  source 1..20: mol_type = other RNA
cactcttgtctgtggaaaca

SEQ ID NO: 165 - DNA, 20 bp, synthetic construct
  source 1..20: mol_type = other DNA
cactcttgtctgtggaaaca

SEQ ID NO: 166 - RNA, 100 nt, synthetic construct
  source 1..100: mol_type = other RNA
cactcttgtctgtggaaacagttttagagctagaaatagcaagttaaaataaggctagtccgttatcaacttgaaaaagtggcaccgagtcggtgctttt

SEQ ID NO: 167 - RNA, 100 nt, synthetic construct; identical to SEQ ID NO: 166
  source 1..100: mol_type = other RNA

SEQ ID NO: 168 - DNA, 145 bp, synthetic construct
  source 1..145: mol_type = other DNA
aggaacccctagtgatggagttggccactccctctctgcgcgctcgctcgctcactgaggccgcccgggcaaagcccgggcgtcgggcgacctttggtcgcccggcctcagtgagcgagcgagcgcgcagagagggagtggccaa

SEQ ID NO: 169 - DNA, 230 bp, synthetic construct
  source 1..230: mol_type = other DNA
taatcagccataccacatttgtagaggttttacttgctttaaaaaacctcccacacctccccctgaacctgaaacataaaatgaatgcaattgttgttgttaacttgtttattgcagcttataatggttacaaataaagcaatagcatcacaaatttcacaaataaagcatttttttcactgcattctagttgtggtttgtccaaactcatcaatgtatcttatcatgtc

SEQ ID NO: 170 - DNA, 363 bp, synthetic construct
  source 1..363: mol_type = other DNA
gaggtgcagctggtggagtctgggggaggcttggtacagcctggggggtccctgagactctcctgtgcagcctctggattcgcctttagcagctatgccatgacctgggtccgacaggctccagggaaggggctggagtgggtctcagttatcagtggtactggtggtagtacatactacgcagactccgtgaagggccggttcaccatctccagagacaattccaagaacacgctgtatctacaaatgaacagcctgagagccgaggacacggccgtatattactgtgcgaaagggggagcagctcgtagaatggaatacttccagtactggggccagggcaccctggtcaccgtctcctca

SEQ ID NO: 171 - protein, 121 aa, synthetic construct
EVQLVESGGGLVQPGGSLRLSCAASGFAFSSYAMTWVRQAPGKGLEWVSVISGTGGSTYYADSVKGRFTISRDNSKNTLYLQMNSLRAEDTAVYYCAKGGAARRMEYFQYWGQGTLVTVSS

SEQ ID NO: 172 - protein, 8 aa, synthetic construct
GFAFSSYA

SEQ ID NO: 173 - protein, 8 aa, synthetic construct
ISGTGGST

SEQ ID NO: 174 - protein, 14 aa, synthetic construct
AKGGAARRMEYFQY

SEQ ID NO: 175 - DNA, 321 bp, synthetic construct
  source 1..321: mol_type = other DNA
gacatccagatgacccagtctccatcctccctgtctgcatctgtaggagacagagtcaccatcacttgccgggcgagtcagggcattagcaattatttagcctggtatcagcagaaaccagggaaagttcctaacctccttatctatgctgcatccactttgcaatcaggggtcccatctcgattcagtggcagtggatctgggacagatttcactctcaccatcagcagcctgcagcctgaagatgttgcaacttattactgtcaaaagtataacagtgcccctctcactttcggcggagggaccaaggtggagatcaaa

SEQ ID NO: 176 - protein, 107 aa, synthetic construct
DIQMTQSPSSLSASVGDRVTITCRASQGISNYLAWYQQKPGKVPNLLIYAASTLQSGVPSRFSGSGSGTDFTLTISSLQPEDVATYYCQKYNSAPLTFGGGTKVEIK

SEQ ID NO: 177 - protein, 6 aa, synthetic construct
QGISNY

SEQ ID NO: 178 - skipped

SEQ ID NO: 179 - protein, 9 aa, synthetic construct
QKYNSAPLT

SEQ ID NO: 180 - DNA, 363 bp, synthetic construct
  source 1..363: mol_type = other DNA
gaggtgcagctggtggagtctgggggaggcttggtacagcctggggggtccctgagactctcctgtgcagcctctggattcacctttaacagctatgccatgacctgggtccgccaggctccagggaaggggctggagtgggtctcatttattggtggtagtactggtaacacatactacgcaggctccgtgaagggccggttcaccatctccagcgacaattccaagaagacgctgtatctgcaaatgaacagcctgagagccgaggacacggccgtatattactgtgcgaaagggggagcagctcgtagaatggaatacttccagcactggggccagggcaccctggtcaccgtctcctca

SEQ ID NO: 181 - protein, 121 aa, synthetic construct
EVQLVESGGGLVQPGGSLRLSCAASGFTFNSYAMTWVRQAPGKGLEWVSFIGGSTGNTYYAGSVKGRFTISSDNSKKTLYLQMNSLRAEDTAVYYCAKGGAARRMEYFQHWGQGTLVTVSS

SEQ ID NO: 182 - protein, 8 aa, synthetic construct
GFTFNSYA

SEQ ID NO: 183 - protein, 8 aa, synthetic construct
IGGSTGNT

SEQ ID NO: 184 - protein, 14 aa, synthetic construct
AKGGAARRMEYFQH

SEQ ID NO: 185 - DNA, 321 bp, synthetic construct
  source 1..321: mol_type = other DNA
gacatccagatgacccagtctccatcctccctgtctgcatctataggagacagagtcaccatcacttgccgggcgagtcagggcattagcaattatttagcctggtatcaacagaaaccagggaaagttcctaagctcctgatctatgctgcatccactttgcaatcaggggtcccatctcggttcagtggcagtggatctgggacagatttcactctcaccatcagcagcctgcagcctgaagatgttgcaacttattactgtcaaaaccataacagtgtccctctcactttcggcggagggaccaaggtggagatcaaa

SEQ ID NO: 186 - protein, 107 aa, synthetic construct
DIQMTQSPSSLSASIGDRVTITCRASQGISNYLAWYQQKPGKVPKLLIYAASTLQSGVPSRFSGSGSGTDFTLTISSLQPEDVATYYCQNHNSVPLTFGGGTKVEIK

SEQ ID NO: 187 - protein, 6 aa, synthetic construct
QGISNY

SEQ ID NO: 188 - skipped

SEQ ID NO: 189 - protein, 9 aa, synthetic construct
QNHNSVPLT

SEQ ID NO: 190 - DNA, 366 bp, synthetic construct
  source 1..366: mol_type = other DNA
caggtgcagctggtggagtctgggggaggcgtggtccagcctgggaggtccctgagactctcctgtgcagcgtctggattcaccttcactacctatggcatgcactgggtccgccaggctccaggcaaggggctggagtgggtggctgttatatggtatgatggaagtaataaatattatggagactccgtgaagggccgattcaccatctccagagacaattccaagaacacactgtatctgcaaatgaacagcctgagagtcgacgacacggctgtttattactgtacgagaacccatggctataccaggtcgtcggacggttttgactactggggccagggaaccctggtcaccgtctcctca

SEQ ID NO: 191 - protein, 122 aa, synthetic construct
QVQLVESGGGVVQPGRSLRLSCAASGFTFTTYGMHWVRQAPGKGLEWVAVIWYDGSNKYYGDSVKGRFTISRDNSKNTLYLQMNSLRVDDTAVYYCTRTHGYTRSSDGFDYWGQGTLVTVSS

SEQ ID NO: 192 - protein, 8 aa, synthetic construct
GFTFTTYG

SEQ ID NO: 193 - protein, 8 aa, synthetic construct
IWYDGSNK

SEQ ID NO: 194 - protein, 15 aa, synthetic construct
TRTHGYTRSSDGFDY

SEQ ID NO: 195 - DNA, 321 bp, synthetic construct
  source 1..321: mol_type = other DNA
gacatccagatgacccagtctccatcctccctgtctgcatctgtaggagacagagtcaccatcacttgccgggcaagtcagagcattagaaatgttttaggctggtttcagcagaaaccagggaaagcccctcagcgcctgatctatgctgcatccagtttgcaaagtggggtcccatcaaggttcagcggcagtggatctgggacagaattcactctcacaatcagcagcctacagcctgaagattttgcaacttattactgtctacagcataatttttacccgctcactttcggcggagggaccaaggtggagatcaaa

SEQ ID NO: 196 - protein, 107 aa, synthetic construct
DIQMTQSPSSLSASVGDRVTITCRASQSIRNVLGWFQQKPGKAPQRLIYAASSLQSGVPSRFSGSGSGTEFTLTISSLQPEDFATYYCLQHNFYPLTFGGGTKVEIK

SEQ ID NO: 197 - protein, 6 aa, synthetic construct
QSIRNV

SEQ ID NO: 198 - skipped

SEQ ID NO: 199 - protein, 9 aa, synthetic construct
LQHNFYPLT

SEQ ID NO: 200 - DNA, 369 bp, synthetic construct
  source 1..369: mol_type = other DNA
gaagtgcagctggtggagtctgggggaggcttggtacagcctggcaggtccctgagactctcctgtgcagcctctggattcacctttgatgataaagccatgcactgggtccggcaagttccagggaagggcctggaatggatctcaggtattagttggaatagtggtactataggctatgcggactctgtgaagggccgattcatcatctccagagacaacgccaagaactccctgtatctacaaatgaacagtctgagagctgaggacacggccttgtattactgcgcaaaagatggagataccagtggctggtactggtacggtttggacgtctggggccaagggaccacggtcaccgtctcctca

SEQ ID NO: 201 - protein, 123 aa, synthetic construct
EVQLVESGGGLVQPGRSLRLSCAASGFTFDDKAMHWVRQVPGKGLEWISGISWNSGTIGYADSVKGRFIISRDNAKNSLYLQMNSLRAEDTALYYCAKDGDTSGWYWYGLDVWGQGTTVTVSS

SEQ ID NO: 202 - protein, 8 aa, synthetic construct
GFTFDDKA

SEQ ID NO: 203 - protein, 8 aa, synthetic construct
ISWNSGTI

SEQ ID NO: 204 - protein, 16 aa, synthetic construct
AKDGDTSGWYWYGLDV

SEQ ID NO: 205 - DNA, 321 bp, synthetic construct
  source 1..321: mol_type = other DNA
gaaattgtgttgacacagtctcctgccaccctgtctttgtctccaggggaaagagccaccctctcctgcagggccagtcagagtgttagcagctacttagcctggtaccaacagaaacctggccaggctcccaggctcctcatccatgatgtatccaacagggccactggcatcccagccaggttcagtggcagtgggtctgggacagacttcactctcaccatcagcagtctagagcctgaagattttgtagtttattactgtcagcagcgtagcgactggcccatcaccttcggccaagggacacgactggagattaaa

SEQ ID NO: 206 - protein, 107 aa, synthetic construct
EIVLTQSPATLSLSPGERATLSCRASQSVSSYLAWYQQKPGQAPRLLIHDVSNRATGIPARFSGSGSGTDFTLTISSLEPEDFVVYYCQQRSDWPITFGQGTRLEIK

SEQ ID NO: 207 - protein, 6 aa, synthetic construct
QSVSSY

SEQ ID NO: 208 - skipped

SEQ ID NO: 209 - protein, 9 aa, synthetic construct
QQRSDWPIT

SEQ ID NO: 210 - DNA, 360 bp, synthetic construct
  source 1..360: mol_type = other DNA
caggtgcagctggtggagtctgggggaggcgtggtccagcctgggaggtccctgagactctcctgtatagcctctggattcaccttcagtgtctatggcattcactgggtccgccaggctccaggcaaggggctggagtggatggcagtaatatcacatgatggaaatattaaacactatgcagactccgtgaagggccgattcaccatctccagagacaattccaagaacacgctgtatcttcaaattaacagcctgagaactgaggacacggctgtgtattactgtgcgaaagatacctggaactcccttgatacttttgatatctggggccaagggacaatggtcaccgtctcttca

SEQ ID NO: 211 - protein, 120 aa, synthetic construct
QVQLVESGGGVVQPGRSLRLSCIASGFTFSVYGIHWVRQAPGKGLEWMAVISHDGNIKHYADSVKGRFTISRDNSKNTLYLQINSLRTEDTAVYYCAKDTWNSLDTFDIWGQGTMVTVSS

SEQ ID NO: 212 - protein, 8 aa, synthetic construct
GFTFSVYG

SEQ ID NO: 213 - protein, 8 aa, synthetic construct
ISHDGNIK

SEQ ID NO: 214 - protein, 13 aa, synthetic construct
AKDTWNSLDTFDI

SEQ ID NO: 215 - DNA, 321 bp, synthetic construct
  source 1..321: mol_type = other DNA
gacatccagttgacccagtctccatcctccctgtctgcatctgtaggagacagagtcaccatcacttgctgggccagtcagggcattagcagttatttagcctggtatcagcaaaaaccagggaaagcccctaagctcctgatctatgctgcatccactttgcaaagtggggtcccatcaaggttcagcggcagtggatctgggacagaattcactctcacaatcagcagcctgcagcctgaagattttgcaacttattactgtcaacagcttaatagttaccctctcactttcggcggagggaccaaggtggagatcaaa

SEQ ID NO: 216 - protein, 107 aa, synthetic construct
DIQLTQSPSSLSASVGDRVTITCWASQGISSYLAWYQQKPGKAPKLLIYAASTLQSGVPSRFSGSGSGTEFTLTISSLQPEDFATYYCQQLNSYPLTFGGGTKVEIK

SEQ ID NO: 217 - protein, 6 aa, synthetic construct
QGISSY

SEQ ID NO: 218 - skipped

SEQ ID NO: 219 - protein, 9 aa, synthetic construct
QQLNSYPLT

SEQ ID NO: 220 - DNA, 360 bp, synthetic construct
  source 1..360: mol_type = other DNA
caggtcaccttgagggagtctggtcccgcgctggtgaaaccctcacagaccctcacactgacctgcaccttctctggattctcactcaacacttatgggatgtttgtgagctggatccgtcagcctccagggaaggccctagagtggcttgcacacattcattgggatgatgataaatactacagcacatctctgaagaccaggctcaccatctccaaggacacctccaaaaaccaggtggtccttacaatgaccaacatggaccctgtggacacagccacgtattattgtgcacgggggcacaataatttgaactacatcatccactggggccagggaaccctggtcaccgtctcctca

SEQ ID NO: 221 - protein, 120 aa, synthetic construct
QVTLRESGPALVKPSQTLTLTCTFSGFSLNTYGMFVSWIRQPPGKALEWLAHIHWDDDKYYSTSLKTRLTISKDTSKNQVVLTMTNMDPVDTATYYCARGHNNLNYIIHWGQGTLVTVSS

SEQ ID NO: 222 - protein, 10 aa, synthetic construct
GFSLNTYGMF

SEQ ID NO: 223 - protein, 7 aa, synthetic construct
IHWDDDK

SEQ ID NO: 224 - protein, 12 aa, synthetic construct
ARGHNNLNYIIH

SEQ ID NO: 225 - DNA, 321 bp, synthetic construct
  source 1..321: mol_type = other DNA
gccatccagatgacccagtctccatcctccctgtctgcatctgtaggagacagagtcaccatcacttgccgggcaagtcagggcattagaaatgatttaggctggtatcagcagaaaccagggaaagcccctaagctcctgatctatgctgcatccactttacaaagtggggtcccatcaaggttcagcggcagtggatctggcacagatttcactctcaccatcagcagcctgcagcctgaagattttgcaacttattactgtctacaagattacaattacccattcactttcggccctgggaccaaagtggatatcaaa

SEQ ID NO: 226 - protein, 107 aa, synthetic construct
AIQMTQSPSSLSASVGDRVTITCRASQGIRNDLGWYQQKPGKAPKLLIYAASTLQSGVPSRFSGSGSGTDFTLTISSLQPEDFATYYCLQDYNYPFTFGPGTKVDIK

SEQ ID NO: 227 - protein, 6 aa, synthetic construct
QGIRND

SEQ ID NO: 228 - skipped

SEQ ID NO: 229 - protein, 9 aa, synthetic construct
LQDYNYPFT

SEQ ID NO: 230 - DNA, 348 bp, synthetic construct
  source 1..348: mol_type = other DNA
gaggtgcagctggtggagtctgggggaggcttggtacagcctggagggtccctgagactctcctgtgcagtctctggattcatcttcagtagttatgaaatgaactgggtccgccaggctccagggaaggggctggagtgggtttcatacattagtagtagtggtagtaccatattctacgcagactctgtgaagggccgattcaccatctccagagacaacgccaagaactcactgtatctgcaaatgaacagcctgagagccgaggacacggctgtttattactgtgtgtctggagtggtcctttttgatgtctggggccaagggacaatggtcaccgtctcttca

SEQ ID NO: 231 - protein, 116 aa, synthetic construct
EVQLVESGGGLVQPGGSLRLSCAVSGFIFSSYEMNWVRQAPGKGLEWVSYISSSGSTIFYADSVKGRFTISRDNAKNSLYLQMNSLRAEDTAVYYCVSGVVLFDVWGQGTMVTVSS

SEQ ID NO: 232 - protein, 8 aa, synthetic construct
GFIFSSYE

SEQ ID NO: 233 - protein, 8 aa, synthetic construct
ISSSGSTI

SEQ ID NO: 234 - protein, 9 aa, synthetic construct
VSGVVLFDV

SEQ ID NO: 235 - DNA, 321 bp, synthetic construct
  source 1..321: mol_type = other DNA
gaaatagtgatgacgcagtctccagccaccctgtctgtgtctccgggggaaagagccaccctctcctgcagggccagtcagagtgttagcagcaactttgcctggtaccaacagaaacctggccaggctcccaggctcctcatctatagtgcatcctccagggccactggtatcccagtcaggttcagtggcagtgggtctgggacagagttcactctcaccatcagcagcctgcagtctgaagattttgcagtttattactgtcagcagtataatatctggcctcggacgttcggccaagggaccaaggtggaaatcaaa

SEQ ID NO: 236 - protein, 107 aa, synthetic construct
EIVMTQSPATLSVSPGERATLSCRASQSVSSNFAWYQQKPGQAPRLLIYSASSRATGIPVRFSGSGSGTEFTLTISSLQSEDFAVYYCQQYNIWPRTFGQGTKVEIK

SEQ ID NO: 237 - protein, 6 aa, synthetic construct
QSVSSN

SEQ ID NO: 238 - skipped

SEQ ID NO: 239 - protein, 9 aa, synthetic construct
QQYNIWPRT

SEQ ID NO: 240 - DNA, 375 bp, synthetic construct
  source 1..375: mol_type = other DNA
gaggtgcagctggtggagtctgggggaggcttggtccagcctggggggtccctgagactctcctgtgcagcctctggattcacctttagtaactattggatgacctgggtccgccaggctccagggaaggggctggagtgggtggccaacataaaggaagatggaagtgagaaagactatgtggactctgtgaagggccgattcaccatctccagagacaacgccaagaactcactgtatctgcaaatgaacagcctgagaggcgaggacacggctgtgtattactgtgcgagagatggggagcagctcgtcgattactactactactacgttatggacgtctggggccaagggaccacggtcaccgtctcctca

SEQ ID NO: 241 - protein, 125 aa, synthetic construct
EVQLVESGGGLVQPGGSLRLSCAASGFTFSNYWMTWVRQAPGKGLEWVANIKEDGSEKDYVDSVKGRFTISRDNAKNSLYLQMNSLRGEDTAVYYCARDGEQLVDYYYYYVMDVWGQGTTVTVSS

SEQ ID NO: 242 - protein, 8 aa, synthetic construct
GFTFSNYW

SEQ ID NO: 243 - protein, 8 aa, synthetic construct
IKEDGSEK

SEQ ID NO: 244 - protein, 18 aa, synthetic construct
ARDGEQLVDYYYYYVMDV

SEQ ID NO: 245 - DNA, 321 bp, synthetic construct
  source 1..321: mol_type = other DNA
gacatccagatgacccagtctccatcttccgtgtctgcatctgtaggagacagagtcaccatcacttgtcgggcgagtcagggtattagcagctggttagcctggtatcagcagaaaccagggaaagcccctaagctcctgatctatgctgcatccagtttgcaaagtggggtcccatcaaggttcagcggcagtggatctgggacagatttcactctcaccatcagcagcctgcagcctgaagattttgcaacttactattgtcaaaaggctaacagtttcccgtacacttttggccaggggaccaagctggagatcaaa

SEQ ID NO: 246 - protein, 107 aa, synthetic construct
DIQMTQSPSSVSASVGDRVTITCRASQGISSWLAWYQQKPGKAPKLLIYAASSLQSGVPSRFSGSGSGTDFTLTISSLQPEDFATYYCQKANSFPYTFGQGTKLEIK

SEQ ID NO: 247 - protein, 6 aa, synthetic construct
QGISSW

SEQ ID NO: 248 - skipped

SEQ ID NO: 249 - protein, 9 aa, synthetic construct
QKANSFPYT

SEQ ID NO: 250 - DNA, 381 bp, synthetic construct
  source 1..381: mol_type = other DNA
gaagtgcagctggtggagtctgggggaggcttggtacagcctggcaggtccctgagactctcctgtgcagcctctggattcacctttgatgactatgccatgcactgggtccggcaagctccagggaagggcctggagtgggtctcaggtattagttggaatagtggttacataggctatgcggactctgtgaagggccgattcaccatctccagagacaacgccgagaactccctacatctgcaaatgaacagtctgagagctgaggacacggccttgtattactgtgcaagagggggatctactctggttcggggagttaagggaggctactacggtatggacgtctggggccaagggaccacggtcaccgtctcctca

SEQ ID NO: 251 - protein, 127 aa, synthetic construct
EVQLVESGGGLVQPGRSLRLSCAASGFTFDDYAMHWVRQAPGKGLEWVSGISWNSGYIGYADSVKGRFTISRDNAENSLHLQMNSLRAEDTALYYCARGGSTLVRGVKGGYYGMDVWGQGTTVTVSS

SEQ ID NO: 252 - protein, 8 aa, synthetic construct
GFTFDDYA

SEQ ID NO: 253 - protein, 8 aa, synthetic construct
ISWNSGYI

SEQ ID NO: 254 - protein, 20 aa, synthetic construct
ARGGSTLVRGVKGGYYGMDV

SEQ ID NO: 255 - DNA, 321 bp, synthetic construct
  source 1..321: mol_type = other DNA
gacatccagatgacccagtctccatcctccctgtctgcatctgtaggagacagagtcaccatcacttgccgggcaagtcagagcataagtagctatttaaattggtatcagcagaaaccaggtaaagcccctaaggtcctgatctatgctgcatccagtttgcaaagtggggtcccatcaaggttcagtggcagtggatctgggacagatttcactctcaccatcagcagtctgcaacctgaagattttgcaacttactactgtcaacagagttacagtattccgctcactttcggcggagggaccaaggtggagatcaaa

SEQ ID NO: 256 - protein, 107 aa, synthetic construct
DIQMTQSPSSLSASVGDRVTITCRASQSISSYLNWYQQKPGKAPKVLIYAASSLQSGVPSRFSGSGSGTDFTLTISSLQPEDFATYYCQQSYSIPLTFGGGTKVEIK

SEQ ID NO: 257 - protein, 6 aa, synthetic construct
QSISSY

SEQ ID NO: 258 - skipped

SEQ ID NO: 259 - protein, 9 aa, synthetic construct
QQSYSIPLT

SEQ ID NO: 260 - DNA, 351 bp, synthetic construct
  source 1..351: mol_type = other DNA
caggtgcagctggtggagtctgggggaggcgtggtccagcctgggaggtccctgagactctcctgtgcagcgtctggattcaccttcagtagctatggcatgcactgggtccgccaggctccaggcaaggggctggagtgggtggcagttatatggtatgatggaagtaataaatactatgcagactccgtgaagggccgattcaccatctccagagacatttccaagaacacgctgtatctgcaaatgaacagcctgagagccgaggacacggccgtatattactgtgcgggtcaactggatctcttctttgactactggggccagggaaccctggtcaccgtctcctca

SEQ ID NO: 261 - protein, 117 aa, synthetic construct
QVQLVESGGGVVQPGRSLRLSCAASGFTFSSYGMHWVRQAPGKGLEWVAVIWYDGSNKYYADSVKGRFTISRDISKNTLYLQMNSLRAEDTAVYYCAGQLDLFFDYWGQGTLVTVSS

SEQ ID NO: 262 - protein, 8 aa, synthetic construct
GFTFSSYG

SEQ ID NO: 263 - protein, 8 aa, synthetic construct
IWYDGSNK

SEQ ID NO: 264 - protein, 10 aa, synthetic construct
AGQLDLFFDY

SEQ ID NO: 265 - DNA, 321 bp, synthetic construct
  source 1..321: mol_type = other DNA
gacatccagatgacccagtctccatcctccctgtctgcatctgtaggagacagagtcaccatcacttgccgggcaagtcagagcattgacaggtatttaaattggtatcggcagaaaccagggaaagcccctaagctcctgatctatactacatccagtttgcaaagtggggtcccatcaaggttcagtggcagtggatctgggacagatttcactctcaccctcagcagtctgcagcctgaagattttgcaacttactactgtcagcagagttacagtcccccgctcactttcggcggagggaccaaggtggagatcaaa

SEQ ID NO: 266 - protein, 107 aa, synthetic construct
DIQMTQSPSSLSASVGDRVTITCRASQSIDRYLNWYRQKPGKAPKLLIYTTSSLQSGVPSRFSGSGSGTDFTLTLSSLQPEDFATYYCQQSYSPPLTFGGGTKVEIK

SEQ ID NO: 267 - protein, 6 aa, synthetic construct
QSIDRY

SEQ ID NO: 268 - skipped

SEQ ID NO: 269 - protein, 9 aa, synthetic construct
QQSYSPPLT

SEQ ID NO: 270 - DNA, 375 bp, synthetic construct
  source 1..375: mol_type = other DNA
gaggtgcagctggtggagtctgggggaggcttggtccagcctggggggtccctgagactctcctgtacagcctctggattcacctttagtaactattggatgacctgggtccgccaggctccagggaaggggctggagtgggtggccaacataaaggaagatggaagtgagaaagagtatgtggactctgtgaagggccggttcaccatctccagagacaacgccaagaattcactgtatctgcaaatgaacagcctgagaggcgaggacacggctgtatattactgtgcgagagatggggagcagctcgtcgattactattactactacgttatggacgtctggggccaagggaccacggtcaccgtctcctca

SEQ ID NO: 271 - protein, 125 aa, synthetic construct
EVQLVESGGGLVQPGGSLRLSCTASGFTFSNYWMTWVRQAPGKGLEWVANIKEDGSEKEYVDSVKGRFTISRDNAKNSLYLQMNSLRGEDTAVYYCARDGEQLVDYYYYYVMDVWGQGTTVTVSS

SEQ ID NO: 272 - protein, 8 aa, synthetic construct
GFTFSNYW

SEQ ID NO: 273 - protein, 8 aa, synthetic construct
IKEDGSEK

SEQ ID NO: 274 - protein, 18 aa, synthetic construct
ARDGEQLVDYYYYYVMDV

SEQ ID NO: 275 - DNA, 321 bp, synthetic construct
  source 1..321: mol_type = other DNA
gacatccagatgacccagtctccatcttccgtgtctgcatctgttggagacagagtcaccatcacttgtcgggcgagtcagggtattagcagctggttagcctggtatcagcagaaaccagggaaagcccctaagctcctgatctatgctgcatccagtttgcaaagtggggtcccatcaaggttcagcggcagtggatctgggacagatttcactctcaccatcagcagcctgcagcctgaagattttgcaacttactattgtcaaaaggctgacagtctcccgtacgcttttggccaggggaccaagctggagatcaaa

SEQ ID NO: 276 - protein, 107 aa, synthetic construct
DIQMTQSPSSVSASVGDRVTITCRASQGISSWLAWYQQKPGKAPKLLIYAASSLQSGVPSRFSGSGSGTDFTLTISSLQPEDFATYYCQKADSLPYAFGQGTKLEIK

SEQ ID NO: 277 - protein, 6 aa, synthetic construct
QGISSW

SEQ ID NO: 278 - skipped

SEQ ID NO: 279 - protein, 9 aa, synthetic construct
QKADSLPYA

SEQ ID NO: 280 - DNA, 363 bp, synthetic construct
  source 1..363: mol_type = other DNA
gaggtgcagctggtggagtctgggggaggcttggttcagcctggggggtccctgagactctcctgtgcaacctctggattcacctttaccagctatgacatgaagtgggtccgccaggctccagggctgggcctggagtgggtctcagctattagtggtagtggtggtaacacatactacgcagactccgtgaagggccggttcaccatctccagagacaattccaggaacacgctgtatctgcaaatgaacagcctgagagccgaggacacggccgtatattactgtacgaggtcccatgacttcggtgccttcgactactttgactactggggccagggaaccctggtcaccgtctcctca

SEQ ID NO: 281 - protein, 121 aa, synthetic construct
EVQLVESGGGLVQPGGSLRLSCATSGFTFTSYDMKWVRQAPGLGLEWVSAISGSGGNTYYADSVKGRFTISRDNSRNTLYLQMNSLRAEDTAVYYCTRSHDFGAFDYFDYWGQGTLVTVSS

SEQ ID NO: 282 - protein, 8 aa, synthetic construct
GFTFTSYD

SEQ ID NO: 283 - protein, 8 aa, synthetic construct
ISGSGGNT

SEQ ID NO: 284 - protein, 14 aa, synthetic construct
TRSHDFGAFDYFDY

SEQ ID NO: 285 - DNA, 321 bp, synthetic construct
  source 1..321: mol_type = other DNA
gacatccagatgacccagtctccatcctccctgtctgcatctgtgggagacagagtcaccatcacttgccgggcaagtcagggcattagagatcattttggctggtatcagcagaaaccagggaaagcccctaagcgcctgatctatgctgcatccagtttgcacagtggggtcccatcaaggttcagcggcagtggatctgggacagaattcactctcacaatcagcagcttgcagcctgaagattttgcaacctattactgtctacagtatgatacttacccgctcactttcggcggagggaccaaggtggagatcaaa

SEQ ID NO: 286 - protein, 107 aa, synthetic construct
DIQMTQSPSSLSASVGDRVTITCRASQGIRDHFGWYQQKPGKAPKRLIYAASSLHSGVPSRFSGSGSGTEFTLTISSLQPEDFATYYCLQYDTYPLTFGGGTKVEIK

SEQ ID NO: 287 - protein, 6 aa, synthetic construct
QGIRDH

SEQ ID NO: 288 - skipped

SEQ ID NO: 289 - protein, 9 aa, synthetic construct
LQYDTYPLT

SEQ ID NO: 290 - DNA, 366 bp, synthetic construct
  source 1..366: mol_type = other DNA
gaagtgcagctggtggagtctgggggagacttggtacagcctggcaggtccctgagactctcctgtgcagcctctggattcacctttgatgattatgccatgcactgggtccggcaagctccagggaagggcctggagtgggtctcaggtattagttggaatagtgctaccagagtctatgcggactctgtgaagggccgattcaccatctccagagacaacgccaagaatttcctgtatctgcaaatgaacagtctgagatctgaggacacggccttgtatcactgtgcaaaagatatggatatctcgctagggtactacggtttggacgtctggggccaagggaccacggtcaccgtctcctca

SEQ ID NO: 291 - protein, 122 aa, synthetic construct
EVQLVESGGDLVQPGRSLRLSCAASGFTFDDYAMHWVRQAPGKGLEWVSGISWNSATRVYADSVKGRFTISRDNAKNFLYLQMNSLRSEDTALYHCAKDMDISLGYYGLDVWGQGTTVTVSS

SEQ ID NO: 292 - protein, 8 aa, synthetic construct
GFTFDDYA

SEQ ID NO: 293 - protein, 8 aa, synthetic construct
ISWNSATR

SEQ ID NO: 294 - protein, 15 aa, synthetic construct
AKDMDISLGYYGLDV

SEQ ID NO: 295 - DNA, 324 bp, synthetic construct
  source 1..324: mol_type = other DNA
gaaatagtgatgacgcagtctccagccaccctgtctgtgtctccaggggaaagagccaccctctcctgcagggccagtcagactgttagcagcaacttagcctggtatcagcagaaacctggccaggctcccaggctcctcatctatggttcatcctccagggccactggtatcccagccaggttcagtggcagtgggtctgggacagagttcactctcaccatcagcagcctgcagtctgaagattttgcagtttattactgtcagcagtataataactggcctccctacacttttggccaggggaccaagctggagatcaaa

SEQ ID NO: 296 - protein, 108 aa, synthetic construct
EIVMTQSPATLSVSPGERATLSCRASQTVSSNLAWYQQKPGQAPRLLIYGSSSRATGIPARFSGSGSGTEFTLTISSLQSEDFAVYYCQQYNNWPPYTFGQGTKLEIK

SEQ ID NO: 297 - protein, 6 aa, synthetic construct
QTVSSN

SEQ ID NO: 298 - skipped

SEQ ID NO: 299 - protein, 10 aa, synthetic construct
QQYNNWPPYT

SEQ ID NO: 300 - DNA, 372 bp, synthetic construct
  source 1..372: mol_type = other DNA
cagatcaccttgaaggagtctggtcctacgctggtgaaacccacacagaccctcacgctgacctgcaccttctctgggttctcactcagcactagtggagtgggtgtggtctggatccgtcagccccccggaaaggccctggagtggcttgcactcatttattggaatgatcataagcggtacagcccatctctggggagcaggctcaccatcaccaaggacacctccaaaaaccaggtggtccttacaatgaccaacatggaccctgtggacacagccacatattactgtgcacactacagtgggagctattcctactactactatggtttggacgtctggggccaagggaccacggtcaccgtctcctca

SEQ ID NO: 301 - protein, 124 aa, synthetic construct
QITLKESGPTLVKPTQTLTLTCTFSGFSLSTSGVGVVWIRQPPGKALEWLALIYWNDHKRYSPSLGSRLTITKDTSKNQVVLTMTNMDPVDTATYYCAHYSGSYSYYYYGLDVWGQGTTVTVSS

SEQ ID NO: 302 - protein, 10 aa, synthetic construct
GFSLSTSGVG

SEQ ID NO: 303 - protein, 7 aa, synthetic construct
IYWNDHK

SEQ ID NO: 304 - protein, 16 aa, synthetic construct
AHYSGSYSYYYYGLDV

SEQ ID NO: 305 - DNA, 321 bp, synthetic construct
  source 1..321: mol_type = other DNA
gacatccagatgacccagtctccatcttccgtgtctgcatctgtaggagacagagtcaccatcacttgtcgggcgagtcagggtattgccagctggttagcctggtatcagcagaaaccagggaaagcccctgagctcctgatctatgctgcatccagtttgcaaggtggggtcccatcaaggttcagcggcagtggatctgggacagatttcactctcaccatcagcagcctgcagcctgaagattttgcaatttactattgtcaacaggctaactatttcccgtggacgttcggccaagggaccaaggtggaaatcaaa

SEQ ID NO: 306 - protein, 107 aa, synthetic construct
DIQMTQSPSSVSASVGDRVTITCRASQGIASWLAWYQQKPGKAPELLIYAASSLQGGVPSRFSGSGSGTDFTLTISSLQPEDFAIYYCQQANYFPWTFGQGTKVEIK

SEQ ID NO: 307 - protein, 6 aa, synthetic construct
QGIASW

SEQ ID NO: 308 - skipped

SEQ ID NO: 309 - protein, 9 aa, synthetic construct
QQANYFPWT

SEQ ID NO: 310 - DNA, 363 bp, synthetic construct
  source 1..363: mol_type = other DNA
gaggtgcagctgttggagtctgggggagccttggtacagcctggggggtccctgagactctcctgtgcagcctctggattcacctttacctcctatgccatgcactgggtccgccaggctccagggaagggtctggagtgggtctcatctattagaggtagtggtggtggcacatactccgcagactccgtgaagggccggttcaccatctccagagacaattccagggacactctatatctgcaaatgaacagtgtgagagccgaggacacggccgtttattactgtgcgaggtcccatgactacggtgccttcgacttctttgactactggggccagggaaccctggtcaccgtctcctca

SEQ ID NO: 311 - protein, 121 aa, synthetic construct
EVQLLESGGALVQPGGSLRLSCAASGFTFTSYAMHWVRQAPGKGLEWVSSIRGSGGGTYSADSVKGRFTISRDNSRDTLYLQMNSVRAEDTAVYYCARSHDYGAFDFFDYWGQGTLVTVSS

SEQ ID NO: 312 - protein, 8 aa, synthetic construct
GFTFTSYA

SEQ ID NO: 313 - protein, 8 aa, synthetic construct
IRGSGGGT

SEQ ID NO: 314 - protein, 14 aa, synthetic construct
ARSHDYGAFDFFDY

SEQ ID NO: 315 - DNA, 321 bp, synthetic construct
  source 1..321: mol_type = other DNA
gacatccagatgacccagtctccatcctccctgtctgcatctgtaggagacagagtcaccatcacttgccgggcaagtcagggcattagaactgatttaggctggtatcagcagaaaccagggaaagcccctaagcgcctgatctatgctgcatccagtttgcaaagtggggtcccatcaaggttcagcggcagtggatctgggacagaattcactctcacaatcagcagcctgcggcctgaagattttgcaactttttactgtctacagtataatagttacccgctcactttcggcggagggaccaaggtggagatcaaa

SEQ ID NO: 316 - protein, 107 aa, synthetic construct
DIQMTQSPSSLSASVGDRVTITCRASQGIRTDLGWYQQKPGKAPKRLIYAASSLQSGVPSRFSGSGSGTEFTLTISSLRPEDFATFYCLQYNSYPLTFGGGTKVEIK

SEQ ID NO: 317 - protein, 6 aa, synthetic construct
QGIRTD

SEQ ID NO: 318 - skipped

SEQ ID NO: 319 - protein, 9 aa, synthetic construct
LQYNSYPLT

SEQ ID NO: 320 - DNA, 348 bp, synthetic construct
  source 1..348: mol_type = other DNA
caggtgcagctggtggagtctgggggaggcttggtcaagcctggagggtccctgagactctcctgtgcagcctctggattcaccttcagtgactacttcatgagctggatccgccaggctccagggaaggggctggagtgggtttcatacattagtagtactggtagtaccataaattatgcagactctgtgaagggccgattcaccatctccagggacaatgtcaagaattcactgtatctgcaaatgaccagcctgagagtcgaggacacggccgtgtattactgtacgagagataactggaactatgaatactggggccagggaaccctggtcaccgtctcctca

SEQ ID NO: 321 - protein, 116 aa, synthetic construct
QVQLVESGGGLVKPGGSLRLSCAASGFTFSDYFMSWIRQAPGKGLEWVSYISSTGSTINYADSVKGRFTISRDNVKNSLYLQMTSLRVEDTAVYYCTRDNWNYEYWGQGTLVTVSS

SEQ ID NO: 322 - protein, 8 aa, synthetic construct
GFTFSDYF

SEQ ID NO: 323 - protein, 8 aa, synthetic construct
ISSTGSTI

SEQ ID NO: 324 - protein, 9 aa, synthetic construct
TRDNWNYEY

SEQ ID NO: 325 - DNA, 321 bp, synthetic construct
  source 1..321: mol_type = other DNA
gaaatagtgatgacgcagtctccagccaccctgtctgtgtctccaggggaaagagccaccctctcctgcagggccagtcagagtgttagcatcaacttagcctggtaccagcagaaacctggccaggctcccaggctcctcatctttgttgcatccaccagggccactggtatcccagccaggttcagtggcagtgggtctgggacagagttcactctcaccatcagcagcctgcagtctgaagattttgcaacttattactgtcagcagtatgatatctggccgtacacttttggccaggggaccaagctggagatcaaa

SEQ ID NO: 326 - protein, 107 aa, synthetic construct
EIVMTQSPATLSVSPGERATLSCRASQSVSINLAWYQQKPGQAPRLLIFVASTRATGIPARFSGSGSGTEFTLTISSLQSEDFATYYCQQYDIWPYTFGQGTKLEIK

SEQ ID NO: 327 - protein, 6 aa, synthetic construct
QSVSIN

SEQ ID NO: 328 - skipped

SEQ ID NO: 329 - protein, 9 aa, synthetic construct
QQYDIWPYT

SEQ ID NO: 330 - DNA, 369 bp, synthetic construct
  source 1..369: mol_type = other DNA
cagctgcagctgcaggagtcgggcccaggactggtgaagccttcggagaccctgtccctcacctgcactgtgtctggtgaatccatcagcagtaatacttactactggggctggatccgccagcccccagggaaggggctggaatggattgggagtatcgattatagtgggaccaccaattataacccgtccctcaagagtcgagtcaccatatccgtagacacgtccaggaatcacttctccctgaggctgaggtctgtgaccgccgcagacacggctgtgtattactgtgcgagagagtggggaaactacggctactattacggtatggacgtttggggccaagggaccacggtcaccgtctcctca

SEQ ID NO: 331 - protein, 123 aa, synthetic construct
QLQLQESGPGLVKPSETLSLTCTVSGESISSNTYYWGWIRQPPGKGLEWIGSIDYSGTTNYNPSLKSRVTISVDTSRNHFSLRLRSVTAADTAVYYCAREWGNYGYYYGMDVWGQGTTVTVSS

SEQ ID NO: 332 - protein, 10 aa, synthetic construct
GESISSNTYY

SEQ ID NO: 333 - protein, 7 aa, synthetic construct
IDYSGTT

SEQ ID NO: 334 - protein, 15 aa, synthetic construct
AREWGNYGYYYGMDV

SEQ ID NO: 335 - DNA, 321 bp, synthetic construct
  source 1..321: mol_type = other DNA
gacatccagatgacccagtctccatcctccctgtctgcatctgtaggagacagagtcaccatcaattgccgggcaagtcagggcattagaaatgatttaggctggtatcagcagaaaccagggaaagcccctaagcgcctgatctatgctgcatccagtttgcaaagtggggtcccattaaggttcagtggcagtggatctgggacagaattcactctcacaatcaacaacctgcagcctgaagattttgcaacttattactgtctatcgcataatagttacccgtggacgttcggccaagggaccaaggtggaaatcaaa

SEQ ID NO: 336 - protein, 107 aa, synthetic construct
DIQMTQSPSSLSASVGDRVTINCRASQGIRNDLGWYQQKPGKAPKRLIYAASSLQSGVPLRFSGSGSGTEFTLTINNLQPEDFATYYCLSHNSYPWTFGQGTKVEIK

SEQ ID NO: 337 - protein, 6 aa, synthetic construct
QGIRND

SEQ ID NO: 338 - skipped

SEQ ID NO: 339 - protein, 9 aa, synthetic construct
LSHNSYPWT

SEQ ID NO: 340 - DNA, 354 bp, synthetic construct
  source 1..354: mol_type = other DNA
caggtgcagctggtgcagtctggggctgaggtgaagaagcctgggtcctcggtgagggtctcctgcaaggcttctagaggcaccttcagcagctatgctatcagctgggtgcgacaggcccctggacaaggccttgagtggatgggagggatcatccccatctttggtacagcaaactacgcacagaagttcctggccagagtcacgattaccgcggacgaatccacgagcacagcctacatggagctgagcagcctgagatctgaggacacggccgtgtattactgtgcgagagagaaggggtggaactactttgactactggggccagggaaccctggtcaccgtctcctca

SEQ ID NO: 341 - protein, 118 aa, synthetic construct
QVQLVQSGAEVKKPGSSVRVSCKASRGTFSSYAISWVRQAPGQGLEWMGGIIPIFGTANYAQKFLARVTITADESTSTAYMELSSLRSEDTAVYYCAREKGWNYFDYWGQGTLVTVSS

SEQ ID NO: 342 - protein, 8 aa, synthetic construct
RGTFSSYA

SEQ ID NO: 343 - protein, 8 aa, synthetic construct
IIPIFGTA

SEQ ID NO: 344 - protein, 11 aa, synthetic construct
AREKGWNYFDY

SEQ ID NO: 345 - DNA, 321 bp, synthetic construct
  source 1..321: mol_type = other DNA
gacatccagatgacccagtctccaccttccgtgtctgcatctgtaggagacagagtcaccatcacttgtcgggcgagtcagggtattagcagctggttagcctggtatcagcagaaaccagggaaagcccctaaactcctgatctatgctgcatccagtttgcaaagtggggtcccatcaaggttcagcggcagtggatctgggacagatttcactctcaccatcagcagcctgcagcctgaagattttgcaacttactattgtcaacaggctaacagtttccctcggacgttcggccaagggaccaaggtggaaatcaaa

SEQ ID NO: 346 - protein, 107 aa, synthetic construct
DIQMTQSPPSVSASVGDRVTITCRASQGISSWLAWYQQKPGKAPKLLIYAASSLQSGVPSRFSGSGSGTDFTLTISSLQPEDFATYYCQQANSFPRTFGQGTKVEIK

SEQ ID NO: 347 - protein, 6 aa, synthetic construct
QGISSW

SEQ ID NO: 348 - skipped

SEQ ID NO: 349 - protein, 9 aa, synthetic construct
QQANSFPRT

SEQ ID NO: 350 - DNA, 369 bp, synthetic construct
  source 1..369: mol_type = other DNA
caggtgcagctggtggagtctgggggaggcttggtcaagcctggagggtccctgagactctcctgtgcagcctctggattcaccttcagtgactactacatgaactggatccgccaggctccagggaaggggctggagtgggtttcatacattagtagtagtgggactaccatatactacgcagactctgtgaagggccgattcaccatctccagggacaacgccaagaaatcactgtatctggagatgaacagcctcagagccgaggacacggccgtgtactactgtgcgagagaggggtacggtaatgactactattactacggtatagacgtctggggccaagggaccacggtcaccgtctcctca

SEQ ID NO: 351 - protein, 123 aa, synthetic construct
QVQLVESGGGLVKPGGSLRLSCAASGFTFSDYYMNWIRQAPGKGLEWVSYISSSGTTIYYADSVKGRFTISRDNAKKSLYLEMNSLRAEDTAVYYCAREGYGNDYYYYGIDVWGQGTTVTVSS

SEQ ID NO: 352 - protein, 8 aa, synthetic construct
GFTFSDYY

SEQ ID NO: 353 - protein, 8 aa, synthetic construct
ISSSGTTI

SEQ ID NO: 354 - protein, 16 aa, synthetic construct
AREGYGNDYYYYGIDV

SEQ ID NO: 355 - DNA, 336 bp, synthetic construct
  source 1..336: mol_type = other DNA
gatattgtgatgactcagtctccactctccctgcccgtcacccctggagagccggcctccatctcctgcaggtctagtcagagcctcctgcatggtaatggatacaactatttgacttggtacctgcagaagccagggcagtctccacagctcctgatctatttgggttctaatcgggcctccggggtccctgacaggttcagtggcagtggatcaggcacagattttacactgaaaataagcagagtggaggctgaggatgttggggtttattactgcatgcaagctctacaaactccgtacacttttggccaggggaccaagctggagatcaaa

SEQ ID NO: 356 - protein, 112 aa, synthetic construct
DIVMTQSPLSLPVTPGEPASISCRSSQSLLHGNGYNYLTWYLQKPGQSPQLLIYLGSNRASGVPDRFSGSGSGTDFTLKISRVEAEDVGVYYCMQALQTPYTFGQGTKLEIK

SEQ ID NO: 357 - protein, 11 aa, synthetic construct
QSLLHGNGYNY

SEQ ID NO: 358 - skipped

SEQ ID NO: 359 - protein, 9 aa, synthetic construct
MQALQTPYT

SEQ ID NO: 360 - DNA, 366 bp, synthetic construct
  source 1..366: mol_type = other DNA
caggtgcagctggtggagtctgggggaggcgtggtccagcctgggaggtccctgagactctcctgtgcagcctctggattcaccttcagtagctttggcatgcactgggtccgccaggctccaggcaaggggctggagtgggtgatatttatatcatatgatggaagtgataaatactatgcagactccgtgaagggccgattcgccatctccagagacagttccaagaacacgctatatctgcaaatgaacagcctgagagctgaggacacggctgtgtattactgtgcgaaagaaaacggtattttgactgattcctacggtatggacgtctggggccaagggaccacggtcaccgtctcctca

SEQ ID NO: 361 - protein, 122 aa, synthetic construct
QVQLVESGGGVVQPGRSLRLSCAASGFTFSSFGMHWVRQAPGKGLEWVIFISYDGSDKYYADSVKGRFAISRDSSKNTLYLQMNSLRAEDTAVYYCAKENGILTDSYGMDVWGQGTTVTVSS

SEQ ID NO: 362 - protein, 8 aa, synthetic construct
GFTFSSFG

SEQ ID NO: 363 - protein, 8 aa, synthetic construct
ISYDGSDK

SEQ ID NO: 364 - protein, 15 aa, synthetic construct
AKENGILTDSYGMDV

SEQ ID NO: 365 - DNA, 324 bp, synthetic construct
  source 1..324: mol_type = other DNA
gacatccagatgacccagtctccatcctccctgtctgcatctgtaggagacagagtcaccatcacttgccgggcaagtcagagcattagcagctatttaaattggtatcagcagaaaccagggaaagcccctaagctcctgatctatgctgcatccagtttgcaaagtggggtcccgtcaaggttcagtggcagtggatctgggacagatttcactctcaccatcagcagtctgcaacctgaagattttgcaacttactactgtcaacagagttacagtacccctccgatcaccttcggccaagggacacgactggagattaaa

SEQ ID NO: 366 - protein, 108 aa, synthetic construct
DIQMTQSPSSLSASVGDRVTITCRASQSISSYLNWYQQKPGKAPKLLIYAASSLQSGVPSRFSGSGSGTDFTLTISSLQPEDFATYYCQQSYSTPPITFGQGTRLEIK

SEQ ID NO: 367 - protein, 6 aa, synthetic construct
QSISSY

SEQ ID NO: 368 - skipped

SEQ ID NO: 369 - protein, 10 aa, synthetic construct
QQSYSTPPIT

SEQ ID NO: 370 - DNA, 372 bp, synthetic construct
  source 1..372: mol_type = other DNA
caggttcagctggtgcagtctggagctgaggtgaagaagcctggggcctctgtgaaggtctcctgcaaggcttctggttacacctttaccagctatggtatcagctgggtgcgacaggcccctggacaagggcttgagtggatgggatggatcagtgtttaccatggtaacacaaactatgcacagaagttccagggcagagtcaccatgaccacagacacatccacgagcacagcctacatggagctgaggagcctgagatctgacgacacggccgtgtattactgtgcgagagaggggtattacgatttttggagtggttattacccttttgactactggggccagggaaccctggtcaccgtctcctca

SEQ ID NO: 371 - protein, 124 aa, synthetic construct
QVQLVQSGAEVKKPGASVKVSCKASGYTFTSYGISWVRQAPGQGLEWMGWISVYHGNTNYAQKFQGRVTMTTDTSTSTAYMELRSLRSDDTAVYYCAREGYYDFWSGYYPFDYWGQGTLVTVSS

SEQ ID NO: 372 - protein, 8 aa, synthetic construct
GYTFTSYG

SEQ ID NO: 373 - protein, 8 aa, synthetic construct
ISVYHGNT

SEQ ID NO: 374 - protein, 17 aa, synthetic construct
AREGYYDFWSGYYPFDY

SEQ ID NO: 375 - DNA, 324 bp, synthetic construct; identical to SEQ ID NO: 365
  source 1..324: mol_type = other DNA

SEQ ID NO: 376 - protein, 108 aa, synthetic construct; identical to SEQ ID NO: 366

SEQ ID NO: 377 - protein, 6 aa, synthetic construct
QSISSY

SEQ ID NO: 378 - skipped

SEQ ID NO: 379 - protein, 10 aa, synthetic construct
QQSYSTPPIT

SEQ ID NO: 380 - DNA, 354 bp, synthetic construct
  source 1..354: mol_type = other DNA
gaggtgcagctggtggagtctgggggaggcttgatacaacctggagggtccctgagactctcctgtgaagcctctggattcaccttcagaaattatgaaatgaattgggtccgccaggctccagggaaggggctggagtgggtttcatatattagtagtagtggtaatatgaaagactacgcagagtctgtgaagggccgattcaccatctccagagacaatgtcaagaattcactgcagctgcaaatgaacagcctgagagtcgaggacacggctgtttattactgtgcgagagacgagtttccttacggaatggacgtctggggccaagggaccacggtcaccgtctcctca

SEQ ID NO: 381 - protein, 118 aa, synthetic construct
EVQLVESGGGLIQPGGSLRLSCEASGFTFRNYEMNWVRQAPGKGLEWVSYISSSGNMKDYAESVKGRFTISRDNVKNSLQLQMNSLRVEDTAVYYCARDEFPYGMDVWGQGTTVTVSS

SEQ ID NO: 382 - protein, 8 aa, synthetic construct
GFTFRNYE

SEQ ID NO: 383 - protein, 8 aa, synthetic construct
ISSSGNMK

SEQ ID NO: 384 - protein, 11 aa, synthetic construct
ARDEFPYGMDV

SEQ ID NO: 385 - DNA, 324 bp, synthetic construct; identical to SEQ ID NO: 365
  source 1..324: mol_type = other DNA

SEQ ID NO: 386 - protein, 108 aa, synthetic construct; identical to SEQ ID NO: 366

SEQ ID NO: 387 - protein, 6 aa, synthetic construct
QSISSY

SEQ ID NO: 388 - skipped

SEQ ID NO: 389 - protein, 10 aa, synthetic construct
QQSYSTPPIT

SEQ ID NO: 390 - DNA, 363 bp, synthetic construct
  source 1..363: mol_type = other DNA
gaagtgcagctggtggagtctgggggaggcttggttcagcctggcaggtccctgagactctcctgtgcagcctctggattcacctttgatgattatgccatgaactgggtccggcaagctccagggaagggcctggagtgggtctcaggtattagttggagtagtggtagcatggactatgcggactctgtgaagggccgattcaccatctccagagacaacgccaaaaactccctgtatctgcaaatgaacagtctgagaactgaggacacggccttatattactgtgcaaaagctagggaagttggagactactacggtatggacgtctggggccaagggaccacggtcaccgtctcctca

SEQ ID NO: 391 - protein, 121 aa, synthetic construct
EVQLVESGGGLVQPGRSLRLSCAASGFTFDDYAMNWVRQAPGKGLEWVSGISWSSGSMDYADSVKGRFTISRDNAKNSLYLQMNSLRTEDTALYYCAKAREVGDYYGMDVWGQGTTVTVSS

SEQ ID NO: 392 - protein, 8 aa, synthetic construct
GFTFDDYA

SEQ ID NO: 393 - protein, 8 aa, synthetic construct
ISWSSGSM

SEQ ID NO: 394 - protein, 14 aa, synthetic construct
AKAREVGDYYGMDV

SEQ ID NO: 395 - DNA, 324 bp, synthetic construct; identical to SEQ ID NO: 365
  source 1..324: mol_type = other DNA

SEQ ID NO: 396 - protein, 108 aa, synthetic construct; identical to SEQ ID NO: 366

SEQ ID NO: 397 - protein, 6 aa, synthetic construct
QSISSY

SEQ ID NO: 398 - skipped

SEQ ID NO: 399 - protein, 10 aa, synthetic construct
QQSYSTPPIT

SEQ ID NO: 400 - DNA, 357 bp, synthetic construct
  source 1..357: mol_type = other DNA
gaagtgcagctggtggagtctgggggaggcttggtacagcctggcaggtccctgacactctcctgtgcagcctctggattcacctttgataattttggcatgcactgggtccggcaaggtccagggaagggcctggaatgggtctcaggtcttacttggaatagtggtgtcataggctatgcggactctgtgaagggccgattcaccatctccagagacaacgccaagaactccctgtatctgcaaatgaacagtctgagacctgaggacacggccttatattactgtgcaaaagatatacggaattacggcccctttgactactggggccagggaaccctggtcaccgtctcctca

SEQ ID NO: 401 - protein, 119 aa, synthetic construct
EVQLVESGGGLVQPGRSLTLSCAASGFTFDNFGMHWVRQGPGKGLEWVSGLTWNSGVIGYADSVKGRFTISRDNAKNSLYLQMNSLRPEDTALYYCAKDIRNYGPFDYWGQGTLVTVSS

SEQ ID NO: 402 - protein, 8 aa, synthetic construct
GFTFDNFG

SEQ ID NO: 403 - protein, 8 aa, synthetic construct
LTWNSGVI

SEQ ID NO: 404 - protein, 12 aa, synthetic construct
AKDIRNYGPFDY

SEQ ID NO: 405 - DNA, 324 bp, synthetic construct
  source 1..324: mol_type = other DNA
gaaattgtgttgacgcagtctccaggcaccctgtctttgtctccaggggaaagagccaccctctcctgcagggccagtcagagtgttagcagcagctacttagcctggtaccagcagaaacctggccaggctcccaggctcctcatctatggtgcatccagcagggccactggcatcccagacaggttcagtggcagtgggtctgggacagacttcactctcaccatcagcagactggagcctgaagattttgcagtgtattactgtcagcagtatggtagctcaccttggacgttcggccaagggaccaaggtggaaatcaaa

SEQ ID NO: 406 - protein, 108 aa, synthetic construct
EIVLTQSPGTLSLSPGERATLSCRASQSVSSSYLAWYQQKPGQAPRLLIYGASSRATGIPDRFSGSGSGTDFTLTISRLEPEDFAVYYCQQYGSSPWTFGQGTKVEIK

SEQ ID NO: 407 - protein, 7 aa, synthetic construct
QSVSSSY

SEQ ID NO: 408 - skipped

SEQ ID NO: 409 - protein, 9 aa, synthetic construct
QQYGSSPWT

SEQ ID NO: 410 - DNA, 357 bp, synthetic construct
  source 1..357: mol_type = other DNA
gaggtgcagctggtggagtctgggggaggcttagtacagcctggagggtccctaagactctcctgtgcagcctctggattcaccttcaatatttttgaaatgaactgggtccgccaggctccagggaaggggctggagtggatttcctacattagtagtcgtggaactaccacatactacgcagactctgtgaggggccgattcaccatctccagagacaacgccaagaactcactgtatctgcaaatgaacagcctgagagccgaggacacggctgtttattactgtgcgagagattatgaagcaacaatcccttttgacttctggggccagggaaccctggtcaccgtctcctca

SEQ ID NO: 411 - protein, 119 aa, synthetic construct
EVQLVESGGGLVQPGGSLRLSCAASGFTFNIFEMNWVRQAPGKGLEWISYISSRGTTTYYADSVRGRFTISRDNAKNSLYLQMNSLRAEDTAVYYCARDYEATIPFDFWGQGTLVTVSS

SEQ ID NO: 412 - protein, 8 aa, synthetic construct
GFTFNIFE

SEQ ID NO: 413 - protein, 8 aa, synthetic construct
ISSRGTTT

SEQ ID NO: 414 - protein, 12 aa, synthetic construct
ARDYEATIPFDF

SEQ ID NO: 415 - DNA, 324 bp, synthetic construct; identical to SEQ ID NO: 365
  source 1..324: mol_type = other DNA

SEQ ID NO: 416 - protein, 108 aa, synthetic construct; identical to SEQ ID NO: 366

SEQ ID NO: 417 - protein, 6 aa, synthetic construct
QSISSY

SEQ ID NO: 418 - skipped

SEQ ID NO: 419 - protein, 10 aa, synthetic construct
QQSYSTPPIT

SEQ ID NO: 420 - DNA, 363 bp, synthetic construct
  source 1..363: mol_type = other DNA
gaggtgcagctggtggagtctgggggaagtgtggtacggcctggggggtccctgagactctcctgtgaagcctctggattcacctttgatgattatggcatgagctgggtccgccaagatccagggaaggggctggagtgggtctctggtattaattggaatggtgatagaacaaattatgcagactctgtgaagggccgattcatcatttccagagacaacgccaagaactctgtgtatctacaaatgaacagtctgagagcggaggactcggccttgtatcactgtgcgagagatcagggactcggagtggcagctacccttgactactggggccagggaaccctggtcaccgtctcctca

SEQ ID NO: 421 - protein, 121 aa, synthetic construct
EVQLVESGGSVVRPGGSLRLSCEASGFTFDDYGMSWVRQDPGKGLEWVSGINWNGDRTNYADSVKGRFIISRDNAKNSVYLQMNSLRAEDSALYHCARDQGLGVAATLDYWGQGTLVTVSS

SEQ ID NO: 422 - protein, 8 aa, synthetic construct
GFTFDDYG

SEQ ID NO: 423 - protein, 8 aa, synthetic construct
INWNGDRT

SEQ ID NO: 424 - protein, 14 aa, synthetic construct
ARDQGLGVAATLDY

SEQ ID NO: 425 - DNA, 324 bp, synthetic construct; identical to SEQ ID NO: 365
  source 1..324: mol_type = other DNA

SEQ ID NO: 426 - protein, 108 aa, synthetic construct; identical to SEQ ID NO: 366

SEQ ID NO: 427 - protein, 6 aa, synthetic construct
QSISSY

SEQ ID NO: 428 - skipped

SEQ ID NO: 429 - protein, 10 aa, synthetic construct
QQSYSTPPIT

SEQ ID NO: 430 - DNA, 384 bp, synthetic construct
  source 1..384: mol_type = other DNA
gaggtgcagctggtggagtctgggggaggcttggtacagcctggagggtccctgagactctcctgtgcagcctctggattcaccgtcagtaattatgaaatgaactgggtccgccaggctccagggaaggggctggagtgggtttcatacattagtagtagtaccagtaacatatactacgcagactctgtgaagggccgattcaccatctccagagacaacgccgagaactcactgtatctgcagatgaacagcctgagagtcgaggacacggctgtttattactgtgtgagagatgggattgtagtagttccagttggtcgtggatactactattacggtttggacgtctggggccaagggaccacggtcaccgtctcctca

SEQ ID NO: 431 - protein, 128 aa, synthetic construct
EVQLVESGGGLVQPGGSLRLSCAASGFTVSNYEMNWVRQAPGKGLEWVSYISSSTSNIYYADSVKGRFTISRDNAENSLYLQMNSLRVEDTAVYYCVRDGIVVVPVGRGYYYYGLDVWGQGTTVTVSS

SEQ ID NO: 432 - protein, 8 aa, synthetic construct
GFTVSNYE

SEQ ID NO: 433 - protein, 8 aa, synthetic construct
ISSSTSNI

SEQ ID NO: 434 - protein, 21 aa, synthetic construct
VRDGIVVVPVGRGYYYYGLDV

SEQ ID NO: 435 - DNA, 324 bp, synthetic construct; identical to SEQ ID NO: 365
  source 1..324: mol_type = other DNA

SEQ ID NO: 436 - protein, 108 aa, synthetic construct; identical to SEQ ID NO: 366

SEQ ID NO: 437 - protein, 6 aa, synthetic construct
QSISSY

SEQ ID NO: 438 - skipped

SEQ ID NO: 439 - protein, 10 aa, synthetic construct
QQSYSTPPIT

SEQ ID NO: 440 - DNA, 378 bp, synthetic construct
  source 1..378: mol_type = other DNA
caggtgcagctggtggagtctgggggaggcgtggtccagcctggaaggtccctgagactctcctgcgcagcctctggattcccctttagtaattatgtcatgtattgggtccgccaggctccaggcaaggggctggagtgggtggctcttattttttttgacggaaagaaaaactatcatgcagactccgtgaagggccgattcaccataaccagagacaattccaaaaatatgttatatctgcaaatgaacagcctgagacctgaggacgcggctgtgtattactgtgcgaaaatccattgtcctaatggtgtatgttacaaggggtattacggaatggacgtctggggccaagggaccacggtcaccgtctcctca

SEQ ID NO: 441 - protein, 126 aa, synthetic construct
QVQLVESGGGVVQPGRSLRLSCAASGFPFSNYVMYWVRQAPGKGLEWVALIFFDGKKNYHADSVKGRFTITRDNSKNMLYLQMNSLRPEDAAVYYCAKIHCPNGVCYKGYYGMDVWGQGTTVTVSS

SEQ ID NO: 442 - protein, 8 aa, synthetic construct
GFPFSNYV

SEQ ID NO: 443 - protein, 8 aa, synthetic construct
IFFDGKKN

SEQ ID NO: 444 - protein, 19 aa, synthetic construct
AKIHCPNGVCYKGYYGMDV

SEQ ID NO: 445 - DNA, 324 bp, synthetic construct; identical to SEQ ID NO: 365
  source 1..324: mol_type = other DNA

SEQ ID NO: 446 - protein, 108 aa, synthetic construct; identical to SEQ ID NO: 366

SEQ ID NO: 447 - protein, 6 aa, synthetic construct
QSISSY

SEQ ID NO: 448 - skipped

SEQ ID NO: 449 - protein, 10 aa, synthetic construct
QQSYSTPPIT

SEQ ID NO: 450 - DNA, 375 bp, synthetic construct
  source 1..375: mol_type = other DNA
gaggtgcagctggtggagtctgggggaggcttggtccagcctggggggtccctaagactctcctgtgcagcctctggattcacctttagtaactattggatgaactgggtccgccaggctccagggaagggactggagtgggtggccaatataaaagaagatggaggtaagaaattgtatgtggactctgtgaagggccgattcaccatctccagagacaacgccaagaactcactgtttctgcaaatgaacagcctgagagccgaggacacggctgtgtattattgtgcgagagaagatacaactttggttgtggactactactactacggtatggacgtctggggccaagggaccacggtcaccgtctcctca

SEQ ID NO: 451 - protein, 125 aa, synthetic construct
EVQLVESGGGLVQPGGSLRLSCAASGFTFSNYWMNWVRQAPGKGLEWVANIKEDGGKKLYVDSVKGRFTISRDNAKNSLFLQMNSLRAEDTAVYYCAREDTTLVVDYYYYGMDVWGQGTTVTVSS

SEQ ID NO: 452 - protein, 8 aa, synthetic construct
GFTFSNYW

SEQ ID NO: 453 - protein, 8 aa, synthetic construct
IKEDGGKK

SEQ ID NO: 454 - protein, 18 aa, synthetic construct
AREDTTLVVDYYYYGMDV

SEQ ID NO: 455 - DNA, 324 bp, synthetic construct; identical to SEQ ID NO: 365
  source 1..324: mol_type = other DNA

SEQ ID NO: 456 - protein, 108 aa, synthetic construct; identical to SEQ ID NO: 366

SEQ ID NO: 457 - protein, 6 aa, synthetic construct
QSISSY

SEQ ID NO: 458 - skipped

SEQ ID NO: 459 - protein, 10 aa, synthetic construct
QQSYSTPPIT

SEQ ID NO: 460 - DNA, 366 bp, synthetic construct
  source 1..366: mol_type = other DNA
caggtccagctggtgcagtctggggctgaggtgaagaagcctgggtcctcggtgaaggtctcctgcaaggcttctggaggcaccttcaacacctatgctatcacctgggtgcgacaggcccctggacaagggcttgaatggatggggggaatcatccctatctctggcatagcagagtacgcacagaagttccagggcagagtcacgatcaccacggatgactcctcgaccacagcctacatggaactgaacagtctgagatctgaggacacggccgtgtattactgtgcgagctggaactacgcactctactacttctacggtatggacgtctggggccgagggaccacggtcaccgtctcctca

SEQ ID NO: 461 - protein, 122 aa, synthetic construct
QVQLVQSGAEVKKPGSSVKVSCKASGGTFNTYAITWVRQAPGQGLEWMGGIIPISGIAEYAQKFQGRVTITTDDSSTTAYMELNSLRSEDTAVYYCASWNYALYYFYGMDVWGRGTTVTVSS

SEQ ID NO: 462 - protein, 8 aa, synthetic construct
GGTFNTYA

SEQ ID NO: 463 - protein, 8 aa, synthetic construct
IIPISGIA

SEQ ID NO: 464 - protein, 15 aa, synthetic construct
ASWNYALYYFYGMDV

SEQ ID NO: 465 - DNA, 324 bp, synthetic construct; identical to SEQ ID NO: 405
  source 1..324: mol_type = other DNA

SEQ ID NO: 466 - protein, 108 aa, synthetic construct; identical to SEQ ID NO: 406

SEQ ID NO: 467 - protein, 7 aa, synthetic construct
QSVSSSY

SEQ ID NO: 468 - skipped

SEQ ID NO: 469 - protein, 9 aa, synthetic construct
QQYGSSPWT

SEQ ID NO: 470 - DNA, 369 bp, synthetic construct
  source 1..369: mol_type = other DNA
caggtgcagctggtggagtctgggggaggcttggtcaagcctggagggtccctgagactctcctgtgcagcctctggattcaccttcagtgtctattacatgaactggatccgccaggctccagggaagggcctggagtgggtttcatacattagtagtagtggtagtaccatatactacgcagactctgtgaagggccgattcaccatctccagggacaacgccaagaactcactgtatctccaaatgaacagtctgagagccgaggacacggccgtatattactgtgggagagaagggtatagtgggacttattcttattacggtatggacgtctggggccaagggaccacggtcaccgtctcctca

SEQ ID NO: 471 - protein, 123 aa, synthetic construct
QVQLVESGGGLVKPGGSLRLSCAASGFTFSVYYMNWIRQAPGKGLEWVSYISSSGSTIYYADSVKGRFTISRDNAKNSLYLQMNSLRAEDTAVYYCGREGYSGTYSYYGMDVWGQGTTVTVSS

SEQ ID NO: 472 - protein, 8 aa, synthetic construct
GFTFSVYY

SEQ ID NO: 473 - protein, 8 aa, synthetic construct
ISSSGSTI

SEQ ID NO: 474 - protein, 16 aa, synthetic construct
GREGYSGTYSYYGMDV

SEQ ID NO: 475 - DNA, 336 bp, synthetic construct
  source 1..336: mol_type = other DNA
gatattgtgatgactcagtctccactctccctgcccgtcacccctggagagccggcctccatctcctgcaggtctagtcagagcctcctgcatagtaatggatacaactatttggattggtacctgcagaagccagggcagtctccacagttcctgatctatttgggttctaatcgggcctccggggtccctgacaggttcagtggcagtggatcaggcacagattttacactgaaaatcaacagagtggaggctgaggatgttggggtttattactgcatgcaagctctacaaactccgtacacttttggccaggggaccaagctggagatcaaa

SEQ ID NO: 476 - protein, 112 aa, synthetic construct
DIVMTQSPLSLPVTPGEPASISCRSSQSLLHSNGYNYLDWYLQKPGQSPQFLIYLGSNRASGVPDRFSGSGSGTDFTLKINRVEAEDVGVYYCMQALQTPYTFGQGTKLEIK

SEQ ID NO: 477 - protein, 11 aa, synthetic construct
QSLLHSNGYNY

SEQ ID NO: 478 - skipped

SEQ ID NO: 479 - protein, 9 aa, synthetic construct
MQALQTPYT

SEQ ID NO: 480 - DNA, 366 bp, synthetic construct
  source 1..366: mol_type = other DNA
gaagtgcagctggtggagtctgggggagggttggtacagcctggcaggtccctgagactctcctgtgcagtctctggattcacctttgatgattatgccatgcactgggtccggcaagctccagggaagggcctggagtgggtctcaggtattagttggaatagtggtaccagaggatatgcggactctgtgaagggccgattcaccatctccagagacaacgccaagaactccctgtatctgcaaatgaacagtctgagaggtgaggacacggccttgtattactgtgtaaaagatattacgatatcccccaactactacggtatggacgtctggggccaagggaccacggtcaccgtctcctca

SEQ ID NO: 481 - protein, 122 aa, synthetic construct
EVQLVESGGGLVQPGRSLRLSCAVSGFTFDDYAMHWVRQAPGKGLEWVSGISWNSGTRGYADSVKGRFTISRDNAKNSLYLQMNSLRGEDTALYYCVKDITISPNYYGMDVWGQGTTVTVSS

SEQ ID NO: 482 - protein, 8 aa, synthetic construct
GFTFDDYA

SEQ ID NO: 483 - protein, 8 aa, synthetic construct
ISWNSGTR

SEQ ID NO: 484 - protein, 15 aa, synthetic construct
VKDITISPNYYGMDV

SEQ ID NO: 485 - DNA, 321 bp, synthetic construct
  source 1..321: mol_type = other DNA
gacatccagatgacccagtctccatcctccctgtctgcatctgtaggagacagagtcaccatcacttgccgggcgagtcaggacattagccattattcagcctggtatcagcagaaaccagggaaacttcctaacctcctgatctatgctgcatccactttgcaatcaggggtcccatctcggttcagtggcagtggatctgggacagatttctctctcaccaccagcagcctgcagcctgaagatgttgcaacttattactgtcaaaagtataacagtgtccctctcactttcggcggagggaccaaggtggagatcaaa

SEQ ID NO: 486 - protein, 107 aa, synthetic construct
DIQMTQSPSSLSASVGDRVTITCRASQDISHYSAWYQQKPGKLPNLLIYAASTLQSGVPSRFSGSGSGTDFSLTTSSLQPEDVATYYCQKYNSVPLTFGGGTKVEIK

SEQ ID NO: 487 - protein, 6 aa, synthetic construct
QDISHY

SEQ ID NO: 488 - skipped

SEQ ID NO: 489 - protein, 9 aa, synthetic construct
QKYNSVPLT

SEQ ID NO: 490 - protein, 118 aa, synthetic construct
EVQLVESGGGLVQPGNSLTLSCVASGFTFSNYGMHWIRQAPKKGLEWIAMIYYDSSKMNYADTVKGRFTISRDNSKNTLYLEMNSLRSEDTAMYYCAVPTSHYVVDVWGQGVSVTVSS

SEQ ID NO: 491 - protein, 107 aa, synthetic construct
DIQMTQSPASLSASLEEIVTITCQASQDIGNWLAWYQQKPGKSPQLLIYGATSLADGVPSRFSGSRSGTQFSLKISRVQVEDIGIYYCLQAYNTPWTFGGGTKLELK

SEQ ID NO: 492 - protein, 243 aa, synthetic construct
DIQMTQSPSSLSASVGDRVTITCRASQGIRDHFGWYQQKPGKAPKRLIYAASSLHSGVPSRFSGSGSGTEFTLTISSLQPEDFATYYCLQYDTYPLTFGGGTKVEIKGGGGSGGGGSGGGGSEVQLVESGGGLVQPGGSLRLSCATSGFTFTSYDMKWVRQAPGLGLEWVSAISGSGGNTYYADSVKGRFTISRDNSRNTLYLQMNSLRAEDTAVYYCTRSHDFGAFDYFDYWGQGTLVTVSS

SEQ ID NO: 493 - protein, 245 aa, synthetic construct
EIVMTQSPATLSVSPGERATLSCRASQTVSSNLAWYQQKPGQAPRLLIYGSSSRATGIPARFSGSGSGTEFTLTISSLQSEDFAVYYCQQYNNWPPYTFGQGTKLEIKGGGGSGGGGSGGGGSEVQLVESGGDLVQPGRSLRLSCAASGFTFDDYAMHWVRQAPGKGLEWVSGISWNSATRVYADSVKGRFTISRDNAKNFLYLQMNSLRSEDTALYHCAKDMDISLGYYGLDVWGQGTTVTVSS

SEQ ID NO: 494 - protein, 246 aa, synthetic construct
DIQMTQSPSSVSASVGDRVTITCRASQGIASWLAWYQQKPGKAPELLIYAASSLQGGVPSRFSGSGSGTDFTLTISSLQPEDFAIYYCQQANYFPWTFGQGTKVEIKGGGGSGGGGSGGGGSQITLKESGPTLVKPTQTLTLTCTFSGFSLSTSGVGVVWIRQPPGKALEWLALIYWNDHKRYSPSLGSRLTITKDTSKNQVVLTMTNMDPVDTATYYCAHYSGSYSYYYYGLDVWGQGTTVTVSS

SEQ ID NO: 495 - protein, 243 aa, synthetic construct
DIQMTQSPSSLSASVGDRVTITCRASQGIRTDLGWYQQKPGKAPKRLIYAASSLQSGVPSRFSGSGSGTEFTLTISSLRPEDFATFYCLQYNSYPLTFGGGTKVEIKGGGGSGGGGSGGGGSEVQLLESGGALVQPGGSLRLSCAASGFTFTSYAMHWVRQAPGKGLEWVSSIRGSGGGTYSADSVKGRFTISRDNSRDTLYLQMNSVRAEDTAVYYCARSHDYGAFDFFDYWGQGTLVTVSS

SEQ ID NO: 496 - protein, 238 aa, synthetic construct
EIVMTQSPATLSVSPGERATLSCRASQSVSINLAWYQQKPGQAPRLLIFVASTRATGIPARFSGSGSGTEFTLTISSLQSEDFATYYCQQYDIWPYTFGQGTKLEIKGGGGSGGGGSGGGGSQVQLVESGGGLVKPGGSLRLSCAASGFTFSDYFMSWIRQAPGKGLEWVSYISSTGSTINYADSVKGRFTISRDNVKNSLYLQMTSLRVEDTAVYYCTRDNWNYEYWGQGTLVTVSS

SEQ ID NO: 497 - protein, 245 aa, synthetic construct
DIQMTQSPSSLSASVGDRVTINCRASQGIRNDLGWYQQKPGKAPKRLIYAASSLQSGVPLRFSGSGSGTEFTLTINNLQPEDFATYYCLSHNSYPWTFGQGTKVEIKGGGGSGGGGSGGGGSQLQLQESGPGLVKPSETLSLTCTVSGESISSNTYYWGWIRQPPGKGLEWIGSIDYSGTTNYNPSLKSRVTISVDTSRNHFSLRLRSVTAADTAVYYCAREWGNYGYYYGMDVWGQGTTVTVSS

SEQ ID NO: 498 - protein, 240 aa, synthetic construct
DIQMTQSPPSVSASVGDRVTITCRASQGISSWLAWYQQKPGKAPKLLIYAASSLQSGVPSRFSGSGSGTDFTLTISSLQPEDFATYYCQQANSFPRTFGQGTKVEIKGGGGSGGGGSGGGGSQVQLVQSGAEVKKPGSSVRVSCKASRGTFSSYAISWVRQAPGQGLEWMGGIIPIFGTANYAQKFLARVTITADESTSTAYMELSSLRSEDTAVYYCAREKGWNYFDYWGQGTLVTVSS

SEQ ID NO: 499 - protein, 250 aa, synthetic construct
DIVMTQSPLSLPVTPGEPASISCRSSQSLLHGNGYNYLTWYLQKPGQSPQLLIYLGSNRASGVPDRFSGSGSGTDFTLKISRVEAEDVGVYYCMQALQTPYTFGQGTKLEIKGGGGSGGGGSGGGGSQVQLVESGGGLVKPGGSLRLSCAASGFTFSDYYMNWIRQAPGKGLEWVSYISSSGTTIYYADSVKGRFTISRDNAKKSLYLEMNSLRAEDTAVYYCAREGYGNDYYYYGIDVWGQGTTVTVSS

SEQ ID NO: 500 - protein, 245 aa, synthetic construct
DIQMTQSPSSLSASVGDRVTITCRASQSISSYLNWYQQKPGKAPKLLIYAASSLQSGVPSRFSGSGSGTDFTLTISSLQPEDFATYYCQQSYSTPPITFGQGTRLEIKGGGGSGGGGSGGGGSQVQLVESGGGVVQPGRSLRLSCAASGFTFSSFGMHWVRQAPGKGLEWVIFISYDGSDKYYADSVKGRFAISRDSSKNTLYLQMNSLRAEDTAVYYCAKENGILTDSYGMDVWGQGTTVTVSS

SEQ ID NO: 501 - protein, 247 aa, synthetic construct
DIQMTQSPSSLSASVGDRVTITCRASQSISSYLNWYQQKPGKAPKLLIYAASSLQSGVPSRFSGSGSGTDFTLTISSLQPEDFATYYCQQSYSTPPITFGQGTRLEIKGGGGSGGGGSGGGGSQVQLVQSGAEVKKPGASVKVSCKASGYTFTSYGISWVRQAPGQGLEWMGWISVYHGNTNYAQKFQGRVTMTTDTSTSTAYMELRSLRSDDTAVYYCAREGYYDFWSGYYPFDYWGQGTLVTVSS

SEQ ID NO: 502 - protein, 241 aa, synthetic construct
DIQMTQSPSSLSASVGDRVTITCRASQSISSYLNWYQQKPGKAPKLLIYAASSLQSGVPSRFSGSGSGTDFTLTISSLQPEDFATYYCQQSYSTPPITFGQGTRLEIKGGGGSGGGGSGGGGSEVQLVESGGGLIQPGGSLRLSCEASGFTFRNYEMNWVRQAPGKGLEWVSYISSSGNMKDYAESVKGRFTISRDNVKNSLQLQMNSLRVEDTAVYYCARDEFPYGMDVWGQGTTVTVSS

SEQ ID NO: 503 - protein, 249 aa, synthetic construct
DIQMTQSPSSLSASVGDRVTITCRASQSISSYLNWYQQKPGKAPKLLIYAASSLQSGVPSRFSGSGSGTDFTLTISSLQPEDFATYYCQQSYSTPPITFGQGTRLEIKGGGGSGGGGSGGGGSQVQLVESGGGVVQPGRSLRLSCAASGFPFSNYVMYWVRQAPGKGLEWVALIFFDGKKNYHADSVKGRFTITRDNSKNMLYLQMNSLRPEDAAVYYCAKIHCPNGVCYKGYYGMDVWGQGTTVTVSS

SEQ ID NO: 504 - protein, 248 aa, synthetic construct
DIQMTQSPSSLSASVGDRVTITCRASQSISSYLNWYQQKPGKAPKLLIYAASSLQSGVPSRFSGSGSGTDFTLTISSLQPEDFATYYCQQSYSTPPITFGQGTRLEIKGGGGSGGGGSGGGGSEVQLVESGGGLVQPGGSLRLSCAASGFTFSNYWMNWVRQAPGKGLEWVANIKEDGGKKLYVDSVKGRFTISRDNAKNSLFLQMNSLRAEDTAVYYCAREDTTLVVDYYYYGMDVWGQGTTVTVSS

SEQ ID NO: 505 - protein, 242 aa, synthetic construct
DIQMTQSPSSLSASVGDRVTITCRASQSISSYLNWYQQKPGKAPKLLIYAASSLQSGVPSRFSGSGSGTDFTLTISSLQPEDFATYYCQQSYSTPPITFGQGTRLEIKGGGGSGGGGSGGGGSEVQLVESGGGLVQPGGSLRLSCAASGFTFNIFEMNWVRQAPGKGLEWISYISSRGTTTYYADSVRGRFTISRDNAKNSLYLQMNSLRAEDTAVYYCARDYEATIPFDFWGQGTLVTVSS

SEQ ID NO: 506 - protein, 244 aa, synthetic construct
DIQMTQSPSSLSASVGDRVTITCRASQSISSYLNWYQQKPGKAPKLLIYAASSLQSGVPSRFSGSGSGTDFTLTISSLQPEDFATYYCQQSYSTPPITFGQGTRLEIKGGGGSGGGGSGGGGSEVQLVESGGSVVRPGGSLRLSCEASGFTFDDYGMSWVRQDPGKGLEWVSGINWNGDRTNYADSVKGRFIISRDNAKNSVYLQMNSLRAEDSALYHCARDQGLGVAATLDYWGQGTLVTVSS

SEQ ID NO: 507 - protein, 251 aa, synthetic construct
DIQMTQSPSSLSASVGDRVTITCRASQSISSYLNWYQQKPGKAPKLLIYAASSLQSGVPSRFSGSGSGTDFTLTISSLQPEDFATYYCQQSYSTPPITFGQGTRLEIKGGGGSGGGGSGGGGSEVQLVESGGGLVQPGGSLRLSCAASGFTVSNYEMNWVRQAPGKGLEWVSYISSSTSNIYYADSVKGRFTISRDNAENSLYLQMNSLRVEDTAVYYCVRDGIVVVPVGRGYYYYGLDVWGQGTTVTVSS

SEQ ID NO: 508 - protein, 244 aa, synthetic construct
DIQMTQSPSSLSASVGDRVTITCRASQSISSYLNWYQQKPGKAPKLLIYAASSLQSGVPSRFSGSGSGTDFTLTISSLQPEDFATYYCQQSYSTPPITFGQGTRLEIKGGGGSGGGGSGGGGSEVQLVESGGGLVQPGRSLRLSCAASGFTFDDYAMNWVRQAPGKGLEWVSGISWSSGSMDYADSVKGRFTISRDNAKNSLYLQMNSLRTEDTALYYCAKAREVGDYYGMDVWGQGTTVTVSS

SEQ ID NO: 509 - protein, 242 aa, synthetic construct
EIVLTQSPGTLSLSPGERATLSCRASQSVSSSYLAWYQQKPGQAPRLLIYGASSRATGIPDRFSGSGSGTDFTLTISRLEPEDFAVYYCQQYGSSPWTFGQGTKVEIKGGGGSGGGGSGGGGSEVQLVESGGGLVQPGRSLTLSCAASGFTFDNFGMHWVRQGPGKGLEWVSGLTWNSGVIGYADSVKGRFTISRDNAKNSLYLQMNSLRPEDTALYYCAKDIRNYGPFDYWGQGTLVTVSS

SEQ ID NO: 510 - protein, 245 aa, synthetic construct
EIVLTQSPGTLSLSPGERATLSCRASQSVSSSYLAWYQQKPGQAPRLLIYGASSRATGIPDRFSGSGSGTDFTLTISRLEPEDFAVYYCQQYGSSPWTFGQGTKVEIKGGGGSGGGGSGGGGSQVQLVQSGAEVKKPGSSVKVSCKASGGTFNTYAITWVRQAPGQGLEWMGGIIPISGIAEYAQKFQGRVTITTDDSSTTAYMELNSLRSEDTAVYYCASWNYALYYFYGMDVWGRGTTVTVSS

SEQ ID NO: 511 - protein, 243 aa, synthetic construct
DIQMTQSPSSLSASIGDRVTITCRASQGISNYLAWYQQKPGKVPKLLIYAASTLQSGVPSRFSGSGSGTDFTLTISSLQPEDVATYYCQNHNSVPLTFGGGTKVEIKGGGGSGGGGSGGGGSEVQLVESGGGLVQPGGSLRLSCAASGFTFNSYAMTWVRQAPGKGLEWVSFIGGSTGNTYYAGSVKGRFTISSDNSKKTLYLQMNSLRAEDTAVYYCAKGGAARRMEYFQHWGQGTLVTVSS

SEQ ID NO: 512 - protein, 243 aa, synthetic construct
DIQMTQSPSSLSASVGDRVTITCRASQGISNYLAWYQQKPGKVPNLLIYAASTLQSGVPSRFSGSGSGTDFTLTISSLQPEDVATYYCQKYNSAPLTFGGGTKVEIKGGGGSGGGGSGGGGSEVQLVESGGGLVQPGGSLRLSCAASGFAFSSYAMTWVRQAPGKGLEWVSVISGTGGSTYYADSVKGRFTISRDNSKNTLYLQMNSLRAEDTAVYYCAKGGAARRMEYFQYWGQGTLVTVSS

SEQ ID NO: 513 - protein, 250 aa, synthetic construct
DIVMTQSPLSLPVTPGEPASISCRSSQSLLHSNGYNYLDWYLQKPGQSPQFLIYLGSNRASGVPDRFSGSGSGTDFTLKINRVEAEDVGVYYCMQALQTPYTFGQGTKLEIKGGGGSGGGGSGGGGSQVQLVESGGGLVKPGGSLRLSCAASGFTFSVYYMNWIRQAPGKGLEWVSYISSSGSTIYYADSVKGRFTISRDNAKNSLYLQMNSLRAEDTAVYYCGREGYSGTYSYYGMDVWGQGTTVTVSS

SEQ ID NO: 514 - protein, 244 aa, synthetic construct
DIQMTQSPSSLSASVGDRVTITCRASQDISHYSAWYQQKPGKLPNLLIYAASTLQSGVPSRFSGSGSGTDFSLTTSSLQPEDVATYYCQKYNSVPLTFGGGTKVEIKGGGGSGGGGSGGGGSEVQLVESGGGLVQPGRSLRLSCAVSGFTFDDYAMHWVRQAPGKGLEWVSGISWNSGTRGYADSVKGRFTISRDNAKNSLYLQMNSLRGEDTALYYCVKDITISPNYYGMDVWGQGTTVTVSS

SEQ ID NO: 515 - protein, 239 aa, synthetic construct
DIQMTQSPSSLSASVGDRVTITCRASQSIDRYLNWYRQKPGKAPKLLIYTTSSLQSGVPSRFSGSGSGTDFTLTLSSLQPEDFATYYCQQSYSPPLTFGGGTKVEIKGGGGSGGGGSGGGGSQVQLVESGGGVVQPGRSLRLSCAASGFTFSSYGMHWVRQAPGKGLEWVAVIWYDGSNKYYADSVKGRFTISRDISKNTLYLQMNSLRAEDTAVYYCAGQLDLFFDYWGQGTLVTVSS

SEQ ID NO: 516 - protein, 247 aa, synthetic construct
DIQMTQSPSSVSASVGDRVTITCRASQGISSWLAWYQQKPGKAPKLLIYAASSLQSGVPSRFSGSGSGTDFTLTISSLQPEDFATYYCQKADSLPYAFGQGTKLEIKGGGGSGGGGSGGGGSEVQLVESGGGLVQPGGSLRLSCTASGFTFSNYWMTWVRQAPGKGLEWVANIKEDGSEKEYVDSVKGRFTISRDNAKNSLYLQMNSLRGEDTAVYYCARDGEQLVDYYYYYVMDVWGQGTTVTVSS

SEQ ID NO: 517 - protein, 249 aa, synthetic construct
DIQMTQSPSSLSASVGDRVTITCRASQSISSYLNWYQQKPGKAPKVLIYAASSLQSGVPSRFSGSGSGTDFTLTISSLQPEDFATYYCQQSYSIPLTFGGGTKVEIKGGGGSGGGGSGGGGSEVQLVESGGGLVQPGRSLRLSCAASGFTFDDYAMHWVRQAPGKGLEWVSGISWNSGYIGYADSVKGRFTISRDNAENSLHLQMNSLRAEDTALYYCARGGSTLVRGVKGGYYGMDVWGQGTTVTVSS

SEQ ID NO: 518 - protein, 238 aa, synthetic construct
EIVMTQSPATLSVSPGERATLSCRASQSVSSNFAWYQQKPGQAPRLLIYSASSRATGIPVRFSGSGSGTEFTLTISSLQSEDFAVYYCQQYNIWPRTFGQGTKVEIKGGGGSGGGGSGGGGSEVQLVESGGGLVQPGGSLRLSCAVSGFIFSSYEMNWVRQAPGKGLEWVSYISSSGSTIFYADSVKGRFTISRDNAKNSLYLQMNSLRAEDTAVYYCVSGVVLFDVWGQGTMVTVSS

SEQ ID NO: 519 - protein, 247 aa, synthetic construct
DIQMTQSPSSVSASVGDRVTITCRASQGISSWLAWYQQKPGKAPKLLIYAASSLQSGVPSRFSGSGSGTDFTLTISSLQPEDFATYYCQKANSFPYTFGQGTKLEIKGGGGSGGGGSGGGGSEVQLVESGGGLVQPGGSLRLSCAASGFTFSNYWMTWVRQAPGKGLEWVANIKEDGSEKDYVDSVKGRFTISRDNAKNSLYLQMNSLRGEDTAVYYCARDGEQLVDYYYYYVMDVWGQGTTVTVSS

SEQ ID NO: 520 - protein, 242 aa, synthetic construct
DIQLTQSPSSLSASVGDRVTITCWASQGISSYLAWYQQKPGKAPKLLIYAASTLQSGVPSRFSGSGSGTEFTLTISSLQPEDFATYYCQQLNSYPLTFGGGTKVEIKGGGGSGGGGSGGGGSQVQLVESGGGVVQPGRSLRLSCIASGFTFSVYGIHWVRQAPGKGLEWMAVISHDGNIKHYADSVKGRFTISRDNSKNTLYLQINSLRTEDTAVYYCAKDTWNSLDTFDIWGQGTMVTVSS

SEQ ID NO: 521 - protein, 242 aa, synthetic construct
AIQMTQSPSSLSASVGDRVTITCRASQGIRNDLGWYQQKPGKAPKLLIYAASTLQSGVPSRFSGSGSGTDFTLTISSLQPEDFATYYCLQDYNYPFTFGPGTKVDIKGGGGSGGGGSGGGGSQVTLRESGPALVKPSQTLTLTCTFSGFSLNTYGMFVSWIRQPPGKALEWLAHIHWDDDKYYSTSLKTRLTISKDTSKNQVVLTMTNMDPVDTATYYCARGHNNLNYIIHWGQGTLVTVSS

SEQ ID NO: 522 - protein, 245 aa, synthetic construct
EIVLTQSPATLSLSPGERATLSCRASQSVSSYLAWYQQKPGQAPRLLIHDVSNRATGIPARFSGSGSGTDFTLTISSLEPEDFVVYYCQQRSDWPITFGQGTRLEIKGGGGSGGGGSGGGGSEVQLVESGGGLVQPGRSLRLSCAASGFTFDDKAMHWVRQVPGKGLEWISGISWNSGTIGYADSVKGRFIISRDNAKNSLYLQMNSLRAEDTALYYCAKDGDTSGWYWYGLDVWGQGTTVTVSS

SEQ ID NO: 523 - protein, 244 aa, synthetic construct
DIQMTQSPSSLSASVGDRVTITCRASQSIRNVLGWFQQKPGKAPQRLIYAASSLQSGVPSRFSGSGSGTEFTLTISSLQPEDFATYYCLQHNFYPLTFGGGTKVEIKGGGGSGGGGSGGGGSQVQLVESGGGVVQPGRSLRLSCAASGFTFTTYGMHWVRQAPGKGLEWVAVIWYDGSNKYYGDSVKGRFTISRDNSKNTLYLQMNSLRVDDTAVYYCTRTHGYTRSSDGFDYWGQGTLVTVSS

SEQ ID NO: 524 - DNA, 738 bp, synthetic construct
  source 1..738: mol_type = other DNA
gacatccagatgacacagagcccatcctctgtgtctgcctctgtgggagacagagtgaccatcacctgtagagccagccagggcattgcttcttggctggcctggtatcagcagaagcctggaaaggcccctgagctgctgatctatgctgccagctctctgcaaggtggtgtccccagcagattcagtggcagtggctctggcacagacttcaccctgaccataagcagcctgcagcctgaggactttgccatctactactgccagcaggccaactacttcccctggacatttggccagggcaccaaggtggaaatcaaaggtggtggtggaagtggtggtggtggcagtggtggtggtggaagccagatcaccctgaaagagtctggccccacactggtcaagcccacacagaccctgacactgacctgcaccttctctggcttcagcctgagcaccagtggtgttggagttgtgtggatcagacagcctcctggcaaggccctggaatggctggcactgatctactggaatgaccacaagagatacagccccagcctgggcagcagactgacaatcaccaaggacaccagcaagaaccaggtggtgctgaccatgaccaacatggaccctgtggacacagccacctactattgtgcccactactctggcagctacagctactactactatggcctggatgtgtggggacagggcacaacagtgacagtgtccagt

SEQ ID NO: 525 - DNA, 738 bp, synthetic construct
  source 1..738: mol_type = other DNA
gacatccagatgacccagagcccaagctctgtgtctgcctcagtgggagacagagtgacaatcacctgcagagccagccagggcattgccagctggctggcctggtaccagcagaagcctggcaaagctcctgaactcctgatctatgctgccagcagcctgcagggtggggtgcctagcaggttctctggctcaggctctggcacagacttcaccctgacaatcagcagcctgcagcctgaggactttgctatctactactgccagcaggccaactacttcccctggacctttggccaaggcaccaaggtggagatcaagggaggaggaggctctggtggaggtggctctgggggagggggcagccagatcaccctgaaggagagtggccctacactggttaagcccacccagacactgacactgacctgcaccttctctggcttcagcctgagcaccagtggagtgggagtggtgtggatcagacagccccctggcaaggccctggaatggctggccctgatctactggaatgatcacaagagatacagccctagcctgggctccagactgaccatcaccaaggacaccagcaaaaaccaggtggtgctgaccatgaccaacatggatccagtggacacagccacctactactgtgcccactactctggcagctacagctactactactatggcctggatgtctggggccaaggcaccacagtcacagtgtccagt

SEQ ID NO: 526 - DNA, 738 bp, synthetic construct
  source 1..738: mol_type = other DNA
gatatccagatgacacaaagcccttcctctgtgtctgcttcagtgggagacagagtcacaatcacatgcagagccagccagggcattgccagctggctggcctggtaccagcagaagcctggcaaagccccagaactgctgatctatgctgccagcagcctccagggtggggtgcccagcagattctctggctctggctctggcacagacttcaccctgaccatcagcagcctgcagccagaggactttgccatctactactgccagcaggccaactacttcccctggacctttggccagggcaccaaggtggaaatcaaggggggaggaggctctggaggaggaggcagtggtggaggaggcagccagatcaccctgaaggagtctggccctaccctggtgaagcctacccagaccctgaccctgacctgcaccttctctggcttcagcctgagcacaagtggtgtgggagtggtgtggatcagacaaccccctggcaaggctctggagtggctggccctgatctactggaatgaccacaagagatacagccctagcctgggcagcaggctgaccatcaccaaagataccagcaagaaccaggtggtgctgaccatgaccaacatggaccctgttgacacagccacatactactgtgcccactacagtggcagctacagctactactactatggcctggatgtctggggccagggcaccacagtgacagtgtcctca

SEQ ID NO: 527 - DNA, 726 bp, synthetic construct
  source 1..726: mol_type = other DNA
gacatccagatgacacagagcccctctagcctgtctgcctctgtgggagacagagtgaccatcacctgtagagccagccagagcatcagcagctacctgaactggtatcagcagaagcctggcaaggcccctaaactgctgatctatgctgccagcagcctgcagtctggggtgccctctagattttctggcagtggctctggcacagacttcaccctgaccataagctccctgcagcctgaggactttgccacctactactgtcagcagagctacagcacccctcctatcacctttggccagggcaccagactggaaatcaaaggtggtggtggaagtggtggtggtggcagtggtggtggtggatctgaagtgcagctggtggaaagtggtggtggcctggttcagcctggtggctctctgagactgagctgtgcagcctctggcttcaccttcaacatctttgagatgaactgggtcagacaggccccaggcaaaggcctggaatggatcagctacatcagctccagaggcaccacaacctactatgctgactctgtcagaggcaggttcaccatcagcagagacaatgccaagaacagcctgtacctgcagatgaactccctgagagctgaggacacagcagtgtactactgtgccagggactatgaggctacaatcccctttgacttctggggccagggaaccctggtcacagttagcagt

SEQ ID NO: 528 - DNA, 726 bp, synthetic construct
  source 1..726: mol_type = other DNA
gacatccagatgacccagagccccagcagcctgtctgcctctgtgggtgacagggtgaccattacctgcagagccagccaaagcatcagcagctacctgaactggtaccagcagaagccaggcaaggcccctaagctgctgatctatgctgccagcagcctgcaatctggagtgcctagcagattcagtggctctggctcaggcacagacttcaccctgaccatctccagcctccagcctgaggattttgccacctactactgccagcagagctacagcaccccccctatcacctttggccagggcaccagactggaaatcaagggaggaggaggctctggaggaggaggctctggagggggaggctctgaggtgcagctggtggagtctgggggaggcctggtgcagcctggaggctccctgaggctgagctgtgctgcctcaggcttcaccttcaacatctttgaaatgaactgggtcagacaggcccctggcaaaggcctggaatggatcagctacatcagcagcagaggcacaacaacatactatgctgactctgtgagaggcaggttcacaatcagcagagacaatgccaagaacagcctgtacctgcagatgaacagcctgagagcagaggatacagctgtgtactactgtgccagagactatgaggccaccatcccctttgatttctggggccagggcaccctggttacagtgtccagt

SEQ ID NO: 529 - DNA, 726 bp, synthetic construct
  source 1..726: mol_type = other DNA
gatatccaaatgacccagagccccagctccctgtcagcctctgtgggagacagagtgaccatcacatgcagagccagccagagcatcagcagctacctgaactggtaccagcagaagcctggcaaggcccccaagctgctgatctatgctgccagcagcctgcagtctggagtgccttccagattctctggctcaggcagtggcacagacttcaccctgacaatcagcagcctgcagcctgaagactttgccacctactactgccagcagagctacagcacaccacctatcacctttggccagggcaccagactggagatcaaagggggtgggggctctggggggggaggcagtggaggaggtggctctgaagtccagctggtggagtctggaggaggcctggtgcagcctggaggcagcctgaggctgtcctgtgcagcctctggcttcaccttcaacatctttgagatgaactgggttaggcaggcccctggcaagggcctggaatggatcagctacattagcagcagaggcaccacaacctactatgctgactctgtgaggggcagattcaccatcagcagagataatgccaagaacagcctgtacctgcagatgaacagcctcagagctgaggacacagctgtgtactactgtgccagagattatgaggccaccatcccctttgacttctggggccaaggcaccctggtgacagtgtcttct

SEQ ID NO: 530 - DNA, 732 bp, synthetic construct
  source 1..732: mol_type = other DNA
gacatccagatgacacagagcccctctagcctgtctgcctctgtgggagacagagtgaccatcacctgtagagccagccagagcatcagcagctacctgaactggtatcagcagaagcctggcaaggcccctaaactgctgatctatgctgccagcagcctgcagtctggggtgccctctagattttctggcagtggctctggcacagacttcaccctgaccataagctccctgcagcctgaggactttgccacctactactgtcagcagagctacagcacccctcctatcacctttggccagggcaccagactggaaatcaaaggtggtggtggaagtggtggtggtggcagtggtggtggtggatctgaagtgcagctggtggaaagtggtggtggcctggttcagcctggcagatccctgagactgagctgtgcagcctctggctttacctttgatgactatgccatgaactgggtcagacaggccccaggcaaaggcctggaatgggtgtcaggcatctcttggtcctctggctccatggactatgctgactctgtgaagggcagattcaccatcagcagagacaatgccaagaacagcctgtacctgcagatgaactccctgagaacagaggacacagccctgtactactgtgccaaggccagagaagtgggagactactatggcatggatgtgtggggccagggaaccacagtgacagtcagtagt

SEQ ID NO: 531 - DNA, 732 bp, synthetic construct
  source 1..732: mol_type = other DNA
gatatccagatgacccagagccccagcagcctgtctgccagtgtgggggatagagtgaccatcacctgcagggccagccagagcatcagcagctacctcaactggtaccagcaaaagcctggcaaggcccccaaactgctgatttatgctgccagcagcctgcagtctggggtcccttccagattctctggctctggctctggcacagacttcaccctgaccatcagcagcctgcagccagaggactttgccacatactactgccagcagagctacagcaccccccctatcacctttggccagggcaccaggctggagatcaagggaggtgggggctcaggaggaggtggctctggaggaggaggctcagaggtgcagctggttgagagtggaggaggcctggtgcagcctggcagaagcctgagactgagctgtgctgcctctggcttcacctttgatgactatgccatgaactgggtgagacaggcccctggcaagggcctggaatgggtgtctggcatctcctggagctctggcagcatggactatgctgactctgtgaagggcaggttcaccatcagcagagacaatgccaagaacagcctgtacctgcagatgaacagcctgagaacagaagacacagccctgtactactgtgcaaaagccagagaagtgggagactactatggcatggatgtgtggggccaaggcaccacagtgacagtgagcagt

SEQ ID NO: 532 - DNA, 732 bp, synthetic construct
  source 1..732: mol_type = other DNA
gacatccagatgacccagagccccagctccctgtcagccagtgtgggtgacagagtgaccatcacctgcagagccagccagagcatcagcagctacctgaactggtaccagcagaaacctggcaaagcccccaagctgctgatttatgctgctagcagcctgcagagtggagtgcccagcagattctcaggcagtggctctggcacagacttcaccctgaccatctccagcctgcagccagaagactttgccacctactactgccagcagagctacagcacccctcctatcacctttggccagggcacaagactggagatcaagggaggaggaggctctggaggaggaggctctggagggggaggctctgaggtccaactggttgaatctggagggggcctggtgcaacctggcaggagcctgagactgagctgtgctgcctctggcttcacctttgatgactatgccatgaactgggtgagacaggcccctggcaagggcctggagtgggtgtctggcatcagctggagctctggcagcatggactatgcagattctgtgaagggcaggttcaccatcagcagagataatgccaagaacagcctgtacctgcagatgaacagcctcaggacagaggacacagccctgtactactgtgccaaggccagagaagtgggtgactactatggcatggatgtgtggggccagggcaccacagtgacagtgagctct

SEQ ID NO: 533 - DNA, 738 bp, synthetic construct
  source 1..738: mol_type = other DNA
gacatccagatgacccagtctccatcttccgtgtctgcatctgtaggagacagagtcaccatcacttgtcgggcgagtcagggtattgccagctggttagcctggtatcagcagaaaccagggaaagcccctgagctcctgatctatgctgcatccagtttgcaaggtggggtcccatcaaggttcagcggcagtggatctgggacagatttcactctcaccatcagcagcctgcagcctgaagattttgcaatttactattgtcaacaggctaactatttcccgtggacgttcggccaagggaccaaggtggaaatcaaaggcggcggcggaagcggagggggaggatcaggaggaggcggatcccagatcaccttgaaggagtctggtcctacgctggtgaaacccacacagaccctcacgctgacctgcaccttctctgggttctcactcagcactagtggagtgggtgtggtctggatccgtcagccccccggaaaggccctggagtggcttgcactcatttattggaatgatcataagcggtacagcccatctctggggagcaggctcaccatcaccaaggacacctccaaaaaccaggtggtccttacaatgaccaacatggaccctgtggacacagccacatattactgtgcacactacagtgggagctattcctactactactatggtttggacgtctggggccaagggaccacggtcaccgtctcctca

SEQ ID NO: 534 - DNA, 747 bp, synthetic construct
  source 1..747: mol_type = other DNA
gacatccagatgacccagtctccatcctccctgtctgcatctgtaggagacagagtcaccatcacttgccgggcaagtcagagcattagcagctatttaaattggtatcagcagaaaccagggaaagcccctaagctcctgatctatgctgcatccagtttgcaaagtggggtcccgtcaaggttcagtggcagtggatctgggacagatttcactctcaccatcagcagtctgcaacctgaagattttgcaacttactactgtcaacagagttacagtacccctccgatcaccttcggccaagggacacgactggagattaaaggcggcggcggaagcggagggggaggatcaggaggaggcggatcccaggtgcagctggtggagtctgggggaggcgtggtccagcctggaaggtccctgagactctcctgcgcagcctctggattcccctttagtaattatgtcatgtattgggtccgccaggctccaggcaaggggctggagtgggtggctcttattttttttgacggaaagaaaaactatcatgcagactccgtgaagggccgattcaccataaccagagacaattccaaaaatatgttatatctgcaaatgaacagcctgagacctgaggacgcggctgtgtattactgtgcgaaaatccattgtcctaatggtgtatgttacaaggggtattacggaatggacgtctggggccaagggaccacggtcaccgtctcctca

SEQ ID NO: 535 - DNA, 726 bp, synthetic construct
  source 1..726: mol_type = other DNA
gacatccagatgacccagtctccatcctccctgtctgcatctgtaggagacagagtcaccatcacttgccgggcaagtcagagcattagcagctatttaaattggtatcagcagaaaccagggaaagcccctaagctcctgatctatgctgcatccagtttgcaaagtggggtcccgtcaaggttcagtggcagtggatctgggacagatttcactctcaccatcagcagtctgcaacctgaagattttgcaacttactactgtcaacagagttacagtacccctccgatcaccttcggccaagggacacgactggagattaaaggcggcggcggaagcggagggggaggatcaggaggaggcggatccgaggtgcagctggtggagtctgggggaggcttagtacagcctggagggtccctaagactctcctgtgcagcctctggattcaccttcaatatttttgaaatgaactgggtccgccaggctccagggaaggggctggagtggatttcctacattagtagtcgtggaactaccacatactacgcagactctgtgaggggccgattcaccatctccagagacaacgccaagaactcactgtatctgcaaatgaacagcctgagagccgaggacacggctgtttattactgtgcgagagattatgaagcaacaatcccttttgacttctggggccagggaaccctggtcaccgtctcctca

SEQ ID NO: 536 - DNA, 732 bp, synthetic construct
  source 1..732: mol_type = other DNA
gacatccagatgacccagtctccatcctccctgtctgcatctgtaggagacagagtcaccatcacttgccgggcaagtcagagcattagcagctatttaaattggtatcagcagaaaccagggaaagcccctaagctcctgatctatgctgcatccagtttgcaaagtggggtcccgtcaaggttcagtggcagtggatctgggacagatttcactctcaccatcagcagtctgcaacctgaagattttgcaacttactactgtcaacagagttacagtacccctccgatcaccttcggccaagggacacgactggagattaaaggcggcggcggaagcggagggggaggatcaggaggaggcggatccgaagtgcagctggtggagtctgggggaggcttggttcagcctggcaggtccctgagactctcctgtgcagcctctggattcacctttgatgattatgccatgaactgggtccggcaagctccagggaagggcctggagtgggtctcaggtattagttggagtagtggtagcatggactatgcggactctgtgaagggccgattcaccatctccagagacaacgccaaaaactccctgtatctgcaaatgaacagtctgagaactgaggacacggccttatattactgtgcaaaagctagggaagttggagactactacggtatggacgtctggggccaagggaccacggtcaccgtctcctca

SEQ ID NO: 537 - protein, 5 aa, synthetic construct
GGGGS

SEQ ID NO: 538 - protein, 107 aa, synthetic construct [sequence omitted]

SEQ ID NO: 539 - protein, 107 aa, synthetic construct
ASTKGPSVFPLAPSSKSTSGGTAALGCLVKDYFPEPVTVSWNSGALTSGVHTFPAVLQSSGLYSLSSVVTVPSSSLGTQTYICNVNHKPSNTKVDKKVEPKSCDKTH

SEQ ID NO: 540 - protein, 214 aa, synthetic construct
DIQMTQSPSSLSASVGDRVTITCRASQGISNYLAWYQQKPGKVPNLLIYAASTLQSGVPSRFSGSGSGTDFTLTISSLQPEDVATYYCQKYNSAPLTFGGGTKVEIKRTVAAPSVFIFPPSDEQLKSGTASVVCLLNNFYPREAKVQWKVDNALQSGNSQESVTEQDSKDSTYSLSSTLTLSKADYEKHKVYACEVTHQGLSSPVTKSFNRGEC

SEQ ID NO: 541 - protein, 228 aa, synthetic construct
EVQLVESGGGLVQPGGSLRLSCAASGFAFSSYAMTWVRQAPGKGLEWVSVISGTGGSTYYADSVKGRFTISRDNSKNTLYLQMNSLRAEDTAVYYCAKGGAARRMEYFQYWGQGTLVTVSSASTKGPSVFPLAPSSKSTSGGTAALGCLVKDYFPEPVTVSWNSGALTSGVHTFPAVLQSSGLYSLSSVVTVPSSSLGTQTYICNVNHKPSNTKVDKKVEPKSCDKTH

SEQ ID NO: 542 - protein, 214 aa, synthetic construct
DIQMTQSPSSLSASIGDRVTITCRASQGISNYLAWYQQKPGKVPKLLIYAASTLQSGVPSRFSGSGSGTDFTLTISSLQPEDVATYYCQNHNSVPLTFGGGTKVEIKRTVAAPSVFIFPPSDEQLKSGTASVVCLLNNFYPREAKVQWKVDNALQSGNSQESVTEQDSKDSTYSLSSTLTLSKADYEKHKVYACEVTHQGLSSPVTKSFNRGEC

SEQ ID NO: 543 - protein, 228 aa, synthetic construct
EVQLVESGGGLVQPGGSLRLSCAASGFTFNSYAMTWVRQAPGKGLEWVSFIGGSTGNTYYAGSVKGRFTISSDNSKKTLYLQMNSLRAEDTAVYYCAKGGAARRMEYFQHWGQGTLVTVSSASTKGPSVFPLAPSSKSTSGGTAALGCLVKDYFPEPVTVSWNSGALTSGVHTFPAVLQSSGLYSLSSVVTVPSSSLGTQTYICNVNHKPSNTKVDKKVEPKSCDKTH

SEQ ID NO: 544 - protein, 214 aa, synthetic construct
DIQMTQSPSSLSASVGDRVTITCRASQSIRNVLGWFQQKPGKAPQRLIYAASSLQSGVPSRFSGSGSGTEFTLTISSLQPEDFATYYCLQHNFYPLTFGGGTKVEIKRTVAAPSVFIFPPSDEQLKSGTASVVCLLNNFYPREAKVQWKVDNALQSGNSQESVTEQDSKDSTYSLSSTLTLSKADYEKHKVYACEVTHQGLSSPVTKSFNRGEC

SEQ ID NO: 545 - protein, 229 aa, synthetic construct
QVQLVESGGGVVQPGRSLRLSCAASGFTFTTYGMHWVRQAPGKGLEWVAVIWYDGSNKYYGDSVKGRFTISRDNSKNTLYLQMNSLRVDDTAVYYCTRTHGYTRSSDGFDYWGQGTLVTVSSASTKGPSVFPLAPSSKSTSGGTAALGCLVKDYFPEPVTVSWNSGALTSGVHTFPAVLQSSGLYSLSSVVTVPSSSLGTQTYICNVNHKPSNTKVDKKVEPKSCDKTH

SEQ ID NO: 546 - protein, 214 aa, synthetic construct
EIVLTQSPATLSLSPGERATLSCRASQSVSSYLAWYQQKPGQAPRLLIHDVSNRATGIPARFSGSGSGTDFTLTISSLEPEDFVVYYCQQRSDWPITFGQGTRLEIKRTVAAPSVFIFPPSDEQLKSGTASVVCLLNNFYPREAKVQWKVDNALQSGNSQESVTEQDSKDSTYSLSSTLTLSKADYEKHKVYACEVTHQGLSSPVTKSFNRGEC

SEQ ID NO: 547 - protein, 230 aa, synthetic construct
EVQLVESGGGLVQPGRSLRLSCAASGFTFDDKAMHWVRQVPGKGLEWISGISWNSGTIGYADSVKGRFIISRDNAKNSLYLQMNSLRAEDTALYYCAKDGDTSGWYWYGLDVWGQGTTVTVSSASTKGPSVFPLAPSSKSTSGGTAALGCLVKDYFPEPVTVSWNSGALTSGVHTFPAVLQSSGLYSLSSVVTVPSSSLGTQTYICNVNHKPSNTKVDKKVEPKSCDKTH

SEQ ID NO: 548 - protein, 214 aa, synthetic construct
DIQLTQSPSSLSASVGDRVTITCWASQGISSYLAWYQQKPGKAPKLLIYAASTLQSGVPSRFSGSGSGTEFTLTISSLQPEDFATYYCQQLNSYPLTFGGGTKVEIKRTVAAPSVFIFPPSDEQLKSGTASVVCLLNNFYPREAKVQWKVDNALQSGNSQESVTEQDSKDSTYSLSSTLTLSKADYEKHKVYACEVTHQGLSSPVTKSFNRGEC

SEQ ID NO: 549 - protein, 227 aa, synthetic construct
QVQLVESGGGVVQPGRSLRLSCIASGFTFSVYGIHWVRQAPGKGLEWMAVISHDGNIKHYADSVKGRFTISRDNSKNTLYLQINSLRTEDTAVYYCAKDTWNSLDTFDIWGQGTMVTVSSASTKGPSVFPLAPSSKSTSGGTAALGCLVKDYFPEPVTVSWNSGALTSGVHTFPAVLQSSGLYSLSSVVTVPSSSLGTQTYICNVNHKPSNTKVDKKVEPKSCDKTH

SEQ ID NO: 550 - protein, 214 aa, synthetic construct
AIQMTQSPSSLSASVGDRVTITCRASQGIRNDLGWYQQKPGKAPKLLIYAASTLQSGVPSRFSGSGSGTDFTLTISSLQPEDFATYYCLQDYNYPFTFGPGTKVDIKRTVAAPSVFIFPPSDEQLKSGTASVVCLLNNFYPREAKVQWKVDNALQSGNSQESVTEQDSKDSTYSLSSTLTLSKADYEKHKVYACEVTHQGLSSPVTKSFNRGEC

SEQ ID NO: 551 - protein, 227 aa, synthetic construct
QVTLRESGPALVKPSQTLTLTCTFSGFSLNTYGMFVSWIRQPPGKALEWLAHIHWDDDKYYSTSLKTRLTISKDTSKNQVVLTMTNMDPVDTATYYCARGHNNLNYIIHWGQGTLVTVSSASTKGPSVFPLAPSSKSTSGGTAALGCLVKDYFPEPVTVSWNSGALTSGVHTFPAVLQSSGLYSLSSVVTVPSSSLGTQTYICNVNHKPSNTKVDKKVEPKSCDKTH

SEQ ID NO: 552 - protein, 214 aa, synthetic construct
EIVMTQSPATLSVSPGERATLSCRASQSVSSNFAWYQQKPGQAPRLLIYSASSRATGIPVRFSGSGSGTEFTLTISSLQSEDFAVYYCQQYNIWPRTFGQGTKVEIKRTVAAPSVFIFPPSDEQLKSGTASVVCLLNNFYPREAKVQWKVDNALQSGNSQESVTEQDSKDSTYSLSSTLTLSKADYEKHKVYACEVTHQGLSSPVTKSFNRGEC

SEQ ID NO: 553 - protein, 223 aa, synthetic construct
EVQLVESGGGLVQPGGSLRLSCAVSGFIFSSYEMNWVRQAPGKGLEWVSYISSSGSTIFYADSVKGRFTISRDNAKNSLYLQMNSLRAEDTAVYYCVSGVVLFDVWGQGTMVTVSSASTKGPSVFPLAPSSKSTSGGTAALGCLVKDYFPEPVTVSWNSGALTSGVHTFPAVLQSSGLYSLSSVVTVPSSSLGTQTYICNVNHKPSNTKVDKKVEPKSCDKTH

SEQ ID NO: 554 - protein, 214 aa, synthetic construct
DIQMTQSPSSVSASVGDRVTITCRASQGISSWLAWYQQKPGKAPKLLIYAASSLQSGVPSRFSGSGSGTDFTLTISSLQPEDFATYYCQKANSFPYTFGQGTKLEIKRTVAAPSVFIFPPSDEQLKSGTASVVCLLNNFYPREAKVQWKVDNALQSGNSQESVTEQDSKDSTYSLSSTLTLSKADYEKHKVYACEVTHQGLSSPVTKSFNRGEC

SEQ ID NO: 555 - protein, 232 aa, synthetic construct
EVQLVESGGGLVQPGGSLRLSCAASGFTFSNYWMTWVRQAPGKGLEWVANIKEDGSEKDYVDSVKGRFTISRDNAKNSLYLQMNSLRGEDTAVYYCARDGEQLVDYYYYYVMDVWGQGTTVTVSSASTKGPSVFPLAPSSKSTSGGTAALGCLVKDYFPEPVTVSWNSGALTSGVHTFPAVLQSSGLYSLSSVVTVPSSSLGTQTYICNVNHKPSNTKVDKKVEPKSCDKTH

SEQ ID NO: 556 - protein, 214 aa, synthetic construct
DIQMTQSPSSLSASVGDRVTITCRASQSISSYLNWYQQKPGKAPKVLIYAASSLQSGVPSRFSGSGSGTDFTLTISSLQPEDFATYYCQQSYSIPLTFGGGTKVEIKRTVAAPSVFIFPPSDEQLKSGTASVVCLLNNFYPREAKVQWKVDNALQSGNSQESVTEQDSKDSTYSLSSTLTLSKADYEKHKVYACEVTHQGLSSPVTKSFNRGEC

SEQ ID NO: 557 - protein, 234 aa, synthetic construct
EVQLVESGGGLVQPGRSLRLSCAASGFTFDDYAMHWVRQAPGKGLEWVSGISWNSGYIGYADSVKGRFTISRDNAENSLHLQMNSLRAEDTALYYCARGGSTLVRGVKGGYYGMDVWGQGTTVTVSSASTKGPSVFPLAPSSKSTSGGTAALGCLVKDYFPEPVTVSWNSGALTSGVHTFPAVLQSSGLYSLSSVVTVPSSSLGTQTYICNVNHKPSNTKVDKKVEPKSCDKTH

SEQ ID NO: 558 - protein, 214 aa, synthetic construct
DIQMTQSPSSLSASVGDRVTITCRASQSIDRYLNWYRQKPGKAPKLLIYTTSSLQSGVPSRFSGSGSGTDFTLTLSSLQPEDFATYYCQQSYSPPLTFGGGTKVEIKRTVAAPSVFIFPPSDEQLKSGTASVVCLLNNFYPREAKVQWKVDNALQSGNSQESVTEQDSKDSTYSLSSTLTLSKADYEKHKVYACEVTHQGLSSPVTKSFNRGEC

SEQ ID NO: 559 - protein, 224 aa, synthetic construct
QVQLVESGGGVVQPGRSLRLSCAASGFTFSSYGMHWVRQAPGKGLEWVAVIWYDGSNKYYADSVKGRFTISRDISKNTLYLQMNSLRAEDTAVYYCAGQLDLFFDYWGQGTLVTVSSASTKGPSVFPLAPSSKSTSGGTAALGCLVKDYFPEPVTVSWNSGALTSGVHTFPAVLQSSGLYSLSSVVTVPSSSLGTQTYICNVNHKPSNTKVDKKVEPKSCDKTH

SEQ ID NO: 560 - protein, 214 aa, synthetic construct
DIQMTQSPSSVSASVGDRVTITCRASQGISSWLAWYQQKPGKAPKLLIYAASSLQSGVPSRFSGSGSGTDFTLTISSLQPEDFATYYCQKADSLPYAFGQGTKLEIKRTVAAPSVFIFPPSDEQLKSGTASVVCLLNNFYPREAKVQWKVDNALQSGNSQESVTEQDSKDSTYSLSSTLTLSKADYEKHKVYACEVTHQGLSSPVTKSFNRGEC

SEQ ID NO: 561 - protein, 232 aa, synthetic construct
EVQLVESGGGLVQPGGSLRLSCTASGFTFSNYWMTWVRQAPGKGLEWVANIKEDGSEKEYVDSVKGRFTISRDNAKNSLYLQMNSLRGEDTAVYYCARDGEQLVDYYYYYVMDVWGQGTTVTVSSASTKGPSVFPLAPSSKSTSGGTAALGCLVKDYFPEPVTVSWNSGALTSGVHTFPAVLQSSGLYSLSSVVTVPSSSLGTQTYICNVNHKPSNTKVDKKVEPKSCDKTH

SEQ ID NO: 562 - protein, 214 aa, synthetic construct
DIQMTQSPSSLSASVGDRVTITCRASQGIRDHFGWYQQKPGKAPKRLIYAASSLHSGVPSRFSGSGSGTEFTLTISSLQPEDFATYYCLQYDTYPLTFGGGTKVEIKRTVAAPSVFIFPPSDEQLKSGTASVVCLLNNFYPREAKVQWKVDNALQSGNSQESVTEQDSKDSTYSLSSTLTLSKADYEKHKVYACEVTHQGLSSPVTKSFNRGEC

SEQ ID NO: 563 - protein, 228 aa, synthetic construct
EVQLVESGGGLVQPGGSLRLSCATSGFTFTSYDMKWVRQAPGLGLEWVSAISGSGGNTYYADSVKGRFTISRDNSRNTLYLQMNSLRAEDTAVYYCTRSHDFGAFDYFDYWGQGTLVTVSSASTKGPSVFPLAPSSKSTSGGTAALGCLVKDYFPEPVTVSWNSGALTSGVHTFPAVLQSSGLYSLSSVVTVPSSSLGTQTYICNVNHKPSNTKVDKKVEPKSCDKTH

SEQ ID NO: 564 - protein, 215 aa, synthetic construct
EIVMTQSPATLSVSPGERATLSCRASQTVSSNLAWYQQKPGQAPRLLIYGSSSRATGIPARFSGSGSGTEFTLTISSLQSEDFAVYYCQQYNNWPPYTFGQGTKLEIKRTVAAPSVFIFPPSDEQLKSGTASVVCLLNNFYPREAKVQWKVDNALQSGNSQESVTEQDSKDSTYSLSSTLTLSKADYEKHKVYACEVTHQGLSSPVTKSFNRGEC

SEQ ID NO: 565 - protein, 229 aa, synthetic construct
EVQLVESGGDLVQPGRSLRLSCAASGFTFDDYAMHWVRQAPGKGLEWVSGISWNSATRVYADSVKGRFTISRDNAKNFLYLQMNSLRSEDTALYHCAKDMDISLGYYGLDVWGQGTTVTVSSASTKGPSVFPLAPSSKSTSGGTAALGCLVKDYFPEPVTVSWNSGALTSGVHTFPAVLQSSGLYSLSSVVTVPSSSLGTQTYICNVNHKPSNTKVDKKVEPKSCDKTH

SEQ ID NO: 566 - protein, 214 aa, synthetic construct
DIQMTQSPSSVSASVGDRVTITCRASQGIASWLAWYQQKPGKAPELLIYAASSLQGGVPSRFSGSGSGTDFTLTISSLQPEDFAIYYCQQANYFPWTFGQGTKVEIKRTVAAPSVFIFPPSDEQLKSGTASVVCLLNNFYPREAKVQWKVDNALQSGNSQESVTEQDSKDSTYSLSSTLTLSKADYEKHKVYACEVTHQGLSSPVTKSFNRGEC

SEQ ID NO: 567 - protein, 231 aa, synthetic construct
QITLKESGPTLVKPTQTLTLTCTFSGFSLSTSGVGVVWIRQPPGKALEWLALIYWNDHKRYSPSLGSRLTITKDTSKNQVVLTMTNMDPVDTATYYCAHYSGSYSYYYYGLDVWGQGTTVTVSSASTKGPSVFPLAPSSKSTSGGTAALGCLVKDYFPEPVTVSWNSGALTSGVHTFPAVLQSSGLYSLSSVVTVPSSSLGTQTYICNVNHKPSNTKVDKKVEPKSCDKTH

SEQ ID NO: 568 - protein, 214 aa, synthetic construct
DIQMTQSPSSLSASVGDRVTITCRASQGIRTDLGWYQQKPGKAPKRLIYAASSLQSGVPSRFSGSGSGTEFTLTISSLRPEDFATFYCLQYNSYPLTFGGGTKVEIKRTVAAPSVFIFPPSDEQLKSGTASVVCLLNNFYPREAKVQWKVDNALQSGNSQESVTEQDSKDSTYSLSSTLTLSKADYEKHKVYACEVTHQGLSSPVTKSFNRGEC

SEQ ID NO: 569 - protein, 228 aa, synthetic construct
EVQLLESGGALVQPGGSLRLSCAASGFTFTSYAMHWVRQAPGKGLEWVSSIRGSGGGTYSADSVKGRFTISRDNSRDTLYLQMNSVRAEDTAVYYCARSHDYGAFDFFDYWGQGTLVTVSSASTKGPSVFPLAPSSKSTSGGTAALGCLVKDYFPEPVTVSWNSGALTSGVHTFPAVLQSSGLYSLSSVVTVPSSSLGTQTYICNVNHKPSNTKVDKKVEPKSCDKTH

SEQ ID NO: 570 - protein, 214 aa, synthetic construct
EIVMTQSPATLSVSPGERATLSCRASQSVSINLAWYQQKPGQAPRLLIFVASTRATGIPARFSGSGSGTEFTLTISSLQSEDFATYYCQQYDIWPYTFGQGTKLEIKRTVAAPSVFIFPPSDEQLKSGTASVVCLLNNFYPREAKVQWKVDNALQSGNSQESVTEQDSKDSTYSLSSTLTLSKADYEKHKVYACEVTHQGLSSPVTKSFNRGEC

SEQ ID NO: 571 - protein, 223 aa, synthetic construct
QVQLVESGGGLVKPGGSLRLSCAASGFTFSDYFMSWIRQAPGKGLEWVSYISSTGSTINYADSVKGRFTISRDNVKNSLYLQMTSLRVEDTAVYYCTRDNWNYEYWGQGTLVTVSSASTKGPSVFPLAPSSKSTSGGTAALGCLVKDYFPEPVTVSWNSGALTSGVHTFPAVLQSSGLYSLSSVVTVPSSSLGTQTYICNVNHKPSNTKVDKKVEPKSCDKTH

SEQ ID NO: 572 - protein, 214 aa, synthetic construct
DIQMTQSPSSLSASVGDRVTINCRASQGIRNDLGWYQQKPGKAPKRLIYAASSLQSGVPLRFSGSGSGTEFTLTINNLQPEDFATYYCLSHNSYPWTFGQGTKVEIKRTVAAPSVFIFPPSDEQLKSGTASVVCLLNNFYPREAKVQWKVDNALQSGNSQESVTEQDSKDSTYSLSSTLTLSKADYEKHKVYACEVTHQGLSSPVTKSFNRGEC

SEQ ID NO: 573 - protein, 230 aa, synthetic construct
QLQLQESGPGLVKPSETLSLTCTVSGESISSNTYYWGWIRQPPGKGLEWIGSIDYSGTTNYNPSLKSRVTISVDTSRNHFSLRLRSVTAADTAVYYCAREWGNYGYYYGMDVWGQGTTVTVSSASTKGPSVFPLAPSSKSTSGGTAALGCLVKDYFPEPVTVSWNSGALTSGVHTFPAVLQSSGLYSLSSVVTVPSSSLGTQTYICNVNHKPSNTKVDKKVEPKSCDKTH

SEQ ID NO: 574 - protein, 214 aa, synthetic construct
DIQMTQSPPSVSASVGDRVTITCRASQGISSWLAWYQQKPGKAPKLLIYAASSLQSGVPSRFSGSGSGTDFTLTISSLQPEDFATYYCQQANSFPRTFGQGTKVEIKRTVAAPSVFIFPPSDEQLKSGTASVVCLLNNFYPREAKVQWKVDNALQSGNSQESVTEQDSKDSTYSLSSTLTLSKADYEKHKVYACEVTHQGLSSPVTKSFNRGEC

SEQ ID NO: 575 - protein, 225 aa, synthetic construct
QVQLVQSGAEVKKPGSSVRVSCKASRGTFSSYAISWVRQAPGQGLEWMGGIIPIFGTANYAQKFLARVTITADESTSTAYMELSSLRSEDTAVYYCAREKGWNYFDYWGQGTLVTVSSASTKGPSVFPLAPSSKSTSGGTAALGCLVKDYFPEPVTVSWNSGALTSGVHTFPAVLQSSGLYSLSSVVTVPSSSLGTQTYICNVNHKPSNTKVDKKVEPKSCDKTH

SEQ ID NO: 576 - protein, 219 aa, synthetic construct
DIVMTQSPLSLPVTPGEPASISCRSSQSLLHGNGYNYLTWYLQKPGQSPQLLIYLGSNRASGVPDRFSGSGSGTDFTLKISRVEAEDVGVYYCMQALQTPYTFGQGTKLEIKRTVAAPSVFIFPPSDEQLKSGTASVVCLLNNFYPREAKVQWKVDNALQSGNSQESVTEQDSKDSTYSLSSTLTLSKADYEKHKVYACEVTHQGLSSPVTKSFNRGEC

SEQ ID NO: 577 - protein, 230 aa, synthetic construct
QVQLVESGGGLVKPGGSLRLSCAASGFTFSDYYMNWIRQAPGKGLEWVSYISSSGTTIYYADSVKGRFTISRDNAKKSLYLEMNSLRAEDTAVYYCAREGYGNDYYYYGIDVWGQGTTVTVSSASTKGPSVFPLAPSSKSTSGGTAALGCLVKDYFPEPVTVSWNSGALTSGVHTFPAVLQSSGLYSLSSVVTVPSSSLGTQTYICNVNHKPSNTKVDKKVEPKSCDKTH

SEQ ID NO: 578 - protein, 215 aa, synthetic construct
DIQMTQSPSSLSASVGDRVTITCRASQSISSYLNWYQQKPGKAPKLLIYAASSLQSGVPSRFSGSGSGTDFTLTISSLQPEDFATYYCQQSYSTPPITFGQGTRLEIKRTVAAPSVFIFPPSDEQLKSGTASVVCLLNNFYPREAKVQWKVDNALQSGNSQESVTEQDSKDSTYSLSSTLTLSKADYEKHKVYACEVTHQGLSSPVTKSFNRGEC

SEQ ID NO: 579 - protein, 229 aa, synthetic construct
QVQLVESGGGVVQPGRSLRLSCAASGFTFSSFGMHWVRQAPGKGLEWVIFISYDGSDKYYADSVKGRFAISRDSSKNTLYLQMNSLRAEDTAVYYCAKENGILTDSYGMDVWGQGTTVTVSSASTKGPSVFPLAPSSKSTSGGTAALGCLVKDYFPEPVTVSWNSGALTSGVHTFPAVLQSSGLYSLSSVVTVPSSSLGTQTYICNVNHKPSNTKVDKKVEPKSCDKTH

SEQ ID NO: 580 - protein, 215 aa, synthetic construct; identical to SEQ ID NO: 578

SEQ ID NO: 581 - protein, 231 aa, synthetic construct
QVQLVQSGAEVKKPGASVKVSCKASGYTFTSYGISWVRQAPGQGLEWMGWISVYHGNTNYAQKFQGRVTMTTDTSTSTAYMELRSLRSDDTAVYYCAREGYYDFWSGYYPFDYWGQGTLVTVSSASTKGPSVFPLAPSSKSTSGGTAALGCLVKDYFPEPVTVSWNSGALTSGVHTFPAVLQSSGLYSLSSVVTVPSSSLGTQTYICNVNHKPSNTKVDKKVEPKSCDKTH

SEQ ID NO: 582 - protein, 215 aa, synthetic construct; identical to SEQ ID NO: 578

SEQ ID NO: 583 - protein, 225 aa, synthetic construct
EVQLVESGGGLIQPGGSLRLSCEASGFTFRNYEMNWVRQAPGKGLEWVSYISSSGNMKDYAESVKGRFTISRDNVKNSLQLQMNSLRVEDTAVYYCARDEFPYGMDVWGQGTTVTVSSASTKGPSVFPLAPSSKSTSGGTAALGCLVKDYFPEPVTVSWNSGALTSGVHTFPAVLQSSGLYSLSSVVTVPSSSLGTQTYICNVNHKPSNTKVDKKVEPKSCDKTH

SEQ ID NO: 584 - protein, 215 aa, synthetic construct; identical to SEQ ID NO: 578

SEQ ID NO: 585 - protein, 228 aa, synthetic construct
EVQLVESGGGLVQPGRSLRLSCAASGFTFDDYAMNWVRQAPGKGLEWVSGISWSSGSMDYADSVKGRFTISRDNAKNSLYLQMNSLRTEDTALYYCAKAREVGDYYGMDVWGQGTTVTVSSASTKGPSVFPLAPSSKSTSGGTAALGCLVKDYFPEPVTVSWNSGALTSGVHTFPAVLQSSGLYSLSSVVTVPSSSLGTQTYICNVNHKPSNTKVDKKVEPKSCDKTH

SEQ ID NO: 586 - protein, 215 aa, synthetic construct
EIVLTQSPGTLSLSPGERATLSCRASQSVSSSYLAWYQQKPGQAPRLLIYGASSRATGIPDRFSGSGSGTDFTLTISRLEPEDFAVYYCQQYGSSPWTFGQGTKVEIKRTVAAPSVFIFPPSDEQLKSGTASVVCLLNNFYPREAKVQWKVDNALQSGNSQESVTEQDSKDSTYSLSSTLTLSKADYEKHKVYACEVTHQGLSSPVTKSFNRGEC

SEQ ID NO: 587 - protein, 226 aa, synthetic construct
EVQLVESGGGLVQPGRSLTLSCAASGFTFDNFGMHWVRQGPGKGLEWVSGLTWNSGVIGYADSVKGRFTISRDNAKNSLYLQMNSLRPEDTALYYCAKDIRNYGPFDYWGQGTLVTVSSASTKGPSVFPLAPSSKSTSGGTAALGCLVKDYFPEPVTVSWNSGALTSGVHTFPAVLQSSGLYSLSSVVTVPSSSLGTQTYICNVNHKPSNTKVDKKVEPKSCDKTH

SEQ ID NO: 588 - protein, 215 aa, synthetic construct; identical to SEQ ID NO: 578

SEQ ID NO: 589 - protein, 226 aa, synthetic construct
EVQLVESGGGLVQPGGSLRLSCAASGFTFNIFEMNWVRQAPGKGLEWISYISSRGTTTYYADSVRGRFTISRDNAKNSLYLQMNSLRAEDTAVYYCARDYEATIPFDFWGQGTLVTVSSASTKGPSVFPLAPSSKSTSGGTAALGCLVKDYFPEPVTVSWNSGALTSGVHTFPAVLQSSGLYSLSSVVTVPSSSLGTQTYICNVNHKPSNTKVDKKVEPKSCDKTH

SEQ ID NO: 590 - protein, 215 aa, synthetic construct; identical to SEQ ID NO: 578

SEQ ID NO: 591 - protein, 228 aa, synthetic construct
EVQLVESGGSVVRPGGSLRLSCEASGFTFDDYGMSWVRQDPGKGLEWVSGINWNGDRTNYADSVKGRFIISRDNAKNSVYLQMNSLRAEDSALYHCARDQGLGVAATLDYWGQGTLVTVSSASTKGPSVFPLAPSSKSTSGGTAALGCLVKDYFPEPVTVSWNSGALTSGVHTFPAVLQSSGLYSLSSVVTVPSSSLGTQTYICNVNHKPSNTKVDKKVEPKSCDKTH

SEQ ID NO: 592 - protein, 215 aa, synthetic construct; identical to SEQ ID NO: 578

SEQ ID NO: 593 - protein, 235 aa, synthetic construct
EVQLVESGGGLVQPGGSLRLSCAASGFTVSNYEMNWVRQAPGKGLEWVSYISSSTSNIYYADSVKGRFTISRDNAENSLYLQMNSLRVEDTAVYYCVRDGIVVVPVGRGYYYYGLDVWGQGTTVTVSSASTKGPSVFPLAPSSKSTSGGTAALGCLVKDYFPEPVTVSWNSGALTSGVHTFPAVLQSSGLYSLSSVVTVPSSSLGTQTYICNVNHKPSNTKVDKKVEPKSCDKTH

SEQ ID NO: 594 - protein, 215 aa, synthetic construct; identical to SEQ ID NO: 578

SEQ ID NO: 595 - protein, 233 aa, synthetic construct
QVQLVESGGGVVQPGRSLRLSCAASGFPFSNYVMYWVRQAPGKGLEWVALIFFDGKKNYHADSVKGRFTITRDNSKNMLYLQMNSLRPEDAAVYYCAKIHCPNGVCYKGYYGMDVWGQGTTVTVSSASTKGPSVFPLAPSSKSTSGGTAALGCLVKDYFPEPVTVSWNSGALTSGVHTFPAVLQSSGLYSLSSVVTVPSSSLGTQTYICNVNHKPSNTKVDKKVEPKSCDKTH

SEQ ID NO: 596 - protein, 215 aa, synthetic construct; identical to SEQ ID NO: 578

SEQ ID NO: 597 - protein, 232 aa, synthetic construct
EVQLVESGGGLVQPGGSLRLSCAASGFTFSNYWMNWVRQAPGKGLEWVANIKEDGGKKLYVDSVKGRFTISRDNAKNSLFLQMNSLRAEDTAVYYCAREDTTLVVDYYYYGMDVWGQGTTVTVSSASTKGPSVFPLAPSSKSTSGGTAALGCLVKDYFPEPVTVSWNSGALTSGVHTFPAVLQSSGLYSLSSVVTVPSSSLGTQTYICNVNHKPSNTKVDKKVEPKSCDKTH

SEQ ID NO: 598 - protein, 215 aa, synthetic construct; identical to SEQ ID NO: 586

SEQ ID NO: 599 - protein, 229 aa, synthetic construct
QVQLVQSGAEVKKPGSSVKVSCKASGGTFNTYAITWVRQAPGQGLEWMGGIIPISGIAEYAQKFQGRVTITTDDSSTTAYMELNSLRSEDTAVYYCASWNYALYYFYGMDVWGRGTTVTVSSASTKGPSVFPLAPSSKSTSGGTAALGCLVKDYFPEPVTVSWNSGALTSGVHTFPAVLQSSGLYSLSSVVTVPSSSLGTQTYICNVNHKPSNTKVDKKVEPKSCDKTH

SEQ ID NO: 600 - protein, 219 aa, synthetic construct
DIVMTQSPLSLPVTPGEPASISCRSSQSLLHSNGYNYLDWYLQKPGQSPQFLIYLGSNRASGVPDRFSGSGSGTDFTLKINRVEAEDVGVYYCMQALQTPYTFGQGTKLEIKRTVAAPSVFIFPPSDEQLKSGTASVVCLLNNFYPREAKVQWKVDNALQSGNSQESVTEQDSKDSTYSLSSTLTLSKADYEKHKVYACEVTHQGLSSPVTKSFNRGEC

SEQ ID NO: 601 - protein, 230 aa, synthetic construct
QVQLVESGGGLVKPGGSLRLSCAASGFTFSVYYMNWIRQAPGKGLEWVSYISSSGSTIYYADSVKGRFTISRDNAKNSLYLQMNSLRAEDTAVYYCGREGYSGTYSYYGMDVWGQGTTVTVSSASTKGPSVFPLAPSSKSTSGGTAALGCLVKDYFPEPVTVSWNSGALTSGVHTFPAVLQSSGLYSLSSVVTVPSSSLGTQTYICNVNHKPSNTKVDKKVEPKSCDKTH

SEQ ID NO: 602 - protein, 214 aa, synthetic construct
DIQMTQSPSSLSASVGDRVTITCRASQDISHYSAWYQQKPGKLPNLLIYAASTLQSGVPSRFSGSGSGTDFSLTTSSLQPEDVATYYCQKYNSVPLTFGGGTKVEIKRTVAAPSVFIFPPSDEQLKSGTASVVCLLNNFYPREAKVQWKVDNALQSGNSQESVTEQDSKDSTYSLSSTLTLSKADYEKHKVYACEVTHQGLSSPVTKSFNRGEC

SEQ ID NO: 603 - protein, 229 aa, synthetic construct
EVQLVESGGGLVQPGRSLRLSCAVSGFTFDDYAMHWVRQAPGKGLEWVSGISWNSGTRGYADSVKGRFTISRDNAKNSLYLQMNSLRGEDTALYYCVKDITISPNYYGMDVWGQGTTVTVSSASTKGPSVFPLAPSSKSTSGGTAALGCLVKDYFPEPVTVSWNSGALTSGVHTFPAVLQSSGLYSLSSVVTVPSSSLGTQTYICNVNHKPSNTKVDKKVEPKSCDKTH

SEQ ID NO: 604 - protein, 233 aa, synthetic construct
EVQLVESGGDLVQPGRSLRLSCAASGFTFDDYAMHWVRQAPGKGLEWVSGISWNSATRVYADSVKGRFTISRDNAKNFLYLQMNSLRSEDTALYHCAKDMDISLGYYGLDVWGQGTTVTVSSASTKGPSVFPLAPCSRSTSESTAALGCLVKDYFPEPVTVSWNSGALTSGVHTFPAVLQSSGLYSLSSVVTVPSSSLGTKTYTCNVDHKPSNTKVDKRVESKYGPPLLQGSG

SEQ ID NO: 605 - protein, 235 aa, synthetic construct
QITLKESGPTLVKPTQTLTLTCTFSGFSLSTSGVGVVWIRQPPGKALEWLALIYWNDHKRYSPSLGSRLTITKDTSKNQVVLTMTNMDPVDTATYYCAHYSGSYSYYYYGLDVWGQGTTVTVSSASTKGPSVFPLAPCSRSTSESTAALGCLVKDYFPEPVTVSWNSGALTSGVHTFPAVLQSSGLYSLSSVVTVPSSSLGTKTYTCNVDHKPSNTKVDKRVESKYGPPLLQGSG

SEQ ID NO: 606 - protein, 232 aa, synthetic construct
EVQLVESGGGLVQPGRSLRLSCAASGFTFDDYAMNWVRQAPGKGLEWVSGISWSSGSMDYADSVKGRFTISRDNAKNSLYLQMNSLRTEDTALYYCAKAREVGDYYGMDVWGQGTTVTVSSASTKGPSVFPLAPCSRSTSESTAALGCLVKDYFPEPVTVSWNSGALTSGVHTFPAVLQSSGLYSLSSVVTVPSSSLGTKTYTCNVDHKPSNTKVDKRVESKYGPPLLQGSG

SEQ ID NO: 607 - protein, 230 aa, synthetic construct
EVQLVESGGGLVQPGGSLRLSCAASGFTFNIFEMNWVRQAPGKGLEWISYISSRGTTTYYADSVRGRFTISRDNAKNSLYLQMNSLRAEDTAVYYCARDYEATIPFDFWGQGTLVTVSSASTKGPSVFPLAPCSRSTSESTAALGCLVKDYFPEPVTVSWNSGALTSGVHTFPAVLQSSGLYSLSSVVTVPSSSLGTKTYTCNVDHKPSNTKVDKRVESKYGPPLLQGSG

SEQ ID NO: 608 - protein, 239 aa, synthetic construct
EVQLVESGGGLVQPGGSLRLSCAASGFTVSNYEMNWVRQAPGKGLEWVSYISSSTSNIYYADSVKGRFTISRDNAENSLYLQMNSLRVEDTAVYYCVRDGIVVVPVGRGYYYYGLDVWGQGTTVTVSSASTKGPSVFPLAPCSRSTSESTAALGCLVKDYFPEPVTVSWNSGALTSGVHTFPAVLQSSGLYSLSSVVTVPSSSLGTKTYTCNVDHKPSNTKVDKRVESKYGPPLLQGSG

SEQ ID NO: 609 - protein, 237 aa, synthetic construct
QVQLVESGGGVVQPGRSLRLSCAASGFPFSNYVMYWVRQAPGKGLEWVALIFFDGKKNYHADSVKGRFTITRDNSKNMLYLQMNSLRPEDAAVYYCAKIHCPNGVCYKGYYGMDVWGQGTTVTVSSASTKGPSVFPLAPCSRSTSESTAALGCLVKDYFPEPVTVSWNSGALTSGVHTFPAVLQSSGLYSLSSVVTVPSSSLGTKTYTCNVDHKPSNTKVDKRVESKYGPPLLQGSG

SEQ ID NO: 610 - protein, 29 aa, synthetic construct
MHRPRRRGTRPPPLALLAALLLAARGADA

SEQ ID NO: 611 - protein, 111 aa, synthetic construct
ASTKGPSVFPLAPCSRSTSESTAALGCLVKDYFPEPVTVSWNSGALTSGVHTFPAVLQSSGLYSLSSVVTVPSSSLGTKTYTCNVDHKPSNTKVDKRVESKYGPPLLQGSG

SEQ ID NO: 612 - protein, 29 aa, synthetic construct
MHRPRRRGTRPPPLALLAALLLAARGADA

SEQ ID NO: 613 - DNA, 141 bp, synthetic construct
  source 1..141: mol_type = other DNA
aggaacccctagtgatggagttggccactccctctctgcgcgctcgctcgctcactgaggccgggcgaccaaaggtcgcccgacgcccgggctttgcccgggcggcctcagtgagcgagcgagcgcgcagctgcctgcagg

SEQ ID NO: 614 - DNA, 130 bp, synthetic construct
  source 1..130: mol_type = other DNA
aggaacccctagtgatggagttggccactccctctctgcgcgctcgctcgctcactgaggccgggcgaccaaaggtcgcccgacgcccgggctttgcccgggcggcctcagtgagcgagcgagcgcgcag

SEQ ID NO: 615 - DNA, 227 bp, synthetic construct
  source 1..227: mol_type = other DNA
tcagccataccacatttgtagaggttttacttgctttaaaaaacctcccacacctccccctgaacctgaaacataaaatgaatgcaattgttgttgttaacttgtttattgcagcttataatggttacaaataaagcaatagcatcacaaatttcacaaataaagcatttttttcactgcattctagttgtggtttgtccaaactcatcaatgtatcttatcatgtc

SEQ ID NO: 616 - protein, 15 aa, synthetic construct
GGGGSGGGGSGGGGS

SEQ ID NO: 617 - protein, 10 aa, synthetic construct
GGGGSGGGGS

SEQ ID NO: 618 - DNA, 45 bp, synthetic construct
  source 1..45: mol_type = other DNA
ggcggcggcggaagcggagggggaggatcaggaggaggcggatcc

SEQ ID NO: 619 - DNA, 45 bp, synthetic construct
  source 1..45: mol_type = other DNA
ggtggtggtggaagtggtggtggtggcagtggtggtggtggatct

SEQ ID NO: 620 - DNA, 45 bp, synthetic construct
  source 1..45: mol_type = other DNA
ggaggaggaggctctggaggaggaggctctggagggggaggctct

SEQ ID NO: 621 - DNA, 45 bp, synthetic construct
  source 1..45: mol_type = other DNA
gggggtgggggctctggggggggaggcagtggaggaggtggctct

SEQ ID NO: 622 - DNA, 45 bp, synthetic construct
  source 1..45: mol_type = other DNA
ggaggtgggggctcaggaggaggtggctctggaggaggaggctca

SEQ ID NO: 623 - DNA, 30 bp, synthetic construct
  source 1..30: mol_type = other DNA
ggaggtggtggaagtggaggtggtggaagt

SEQ ID NO: 624 - DNA, 30 bp, synthetic construct
  source 1..30: mol_type = other DNA
ggtggtggtggtagtggtggtggtggctct

SEQ ID NO: 625 - DNA, 30 bp, synthetic construct
  source 1..30: mol_type = other DNA
ggtgggggtggctctgggggtggaggcagt

SEQ ID NO: 626 - DNA, 30 bp, synthetic construct
  source 1..30: mol_type = other DNA
ggaggtggaggctctggaggaggtggcagt

SEQ ID NO: 627 - DNA, 30 bp, synthetic construct
  source 1..30: mol_type = other DNA
ggtggtggtggcagtggtggtggtggttct

SEQ ID NO: 628 - DNA, 30 bp, synthetic construct
  source 1..30: mol_type = other DNA
ggtggaggtggctcagggggaggaggcagt

SEQ ID NO: 629 - DNA, 30 bp, synthetic construct
  source 1..30: mol_type = other DNA
gggggaggaggctcaggtgggggtggcagt

SEQ ID NO: 630 - DNA, 15 bp, synthetic construct
  source 1..15: mol_type = other DNA
ggtggtggtggctct

SEQ ID NO: 631 - protein, 105 aa, synthetic construct
ASTKGPSVFPLAPCSRSTSESTAALGCLVKDYFPEPVTVSWNSGALTSGVHTFPAVLQSSGLYSLSSVVTVPSSSLGTKTYTCNVDHKPSNTKVDKRVESKYGPP

SEQ ID NO: 632 - protein, 112 aa, synthetic construct
DIQLTQSPLSLPVTPGEPASISCRSSQSLLHSNGYNYLDWYLQKPGQSPQFLIYLGSNRASGVPDRFSGSGSGTDFTLKINRVEAEDVGVYYCMQALQTPYTFGQGTKVEIK

SEQ ID NO: 633 - protein, 227 aa, synthetic construct
EVQLVESGGDLVQPGRSLRLSCAASGFTFDDYAMHWVRQAPGKGLEWVSGISWNSATRVYADSVKGRFTISRDNAKNFLYLQMNSLRSEDTALYHCAKDMDISLGYYGLDVWGQGTTVTVSSASTKGPSVFPLAPCSRSTSESTAALGCLVKDYFPEPVTVSWNSGALTSGVHTFPAVLQSSGLYSLSSVVTVPSSSLGTKTYTCNVDHKPSNTKVDKRVESKYGPP

SEQ ID NO: 634 - protein, 229 aa, synthetic construct
QITLKESGPTLVKPTQTLTLTCTFSGFSLSTSGVGVVWIRQPPGKALEWLALIYWNDHKRYSPSLGSRLTITKDTSKNQVVLTMTNMDPVDTATYYCAHYSGSYSYYYYGLDVWGQGTTVTVSSASTKGPSVFPLAPCSRSTSESTAALGCLVKDYFPEPVTVSWNSGALTSGVHTFPAVLQSSGLYSLSSVVTVPSSSLGTKTYTCNVDHKPSNTKVDKRVESKYGPP

SEQ ID NO: 635 - protein, 226 aa, synthetic construct
EVQLVESGGGLVQPGRSLRLSCAASGFTFDDYAMNWVRQAPGKGLEWVSGISWSSGSMDYADSVKGRFTISRDNAKNSLYLQMNSLRTEDTALYYCAKAREVGDYYGMDVWGQGTTVTVSSASTKGPSVFPLAPCSRSTSESTAALGCLVKDYFPEPVTVSWNSGALTSGVHTFPAVLQSSGLYSLSSVVTVPSSSLGTKTYTCNVDHKPSNTKVDKRVESKYGPP

SEQ ID NO: 636 - protein, 224 aa, synthetic construct
EVQLVESGGGLVQPGGSLRLSCAASGFTFNIFEMNWVRQAPGKGLEWISYISSRGTTTYYADSVRGRFTISRDNAKNSLYLQMNSLRAEDTAVYYCARDYEATIPFDFWGQGTLVTVSSASTKGPSVFPLAPCSRSTSESTAALGCLVKDYFPEPVTVSWNSGALTSGVHTFPAVLQSSGLYSLSSVVTVPSSSLGTKTYTCNVDHKPSNTKVDKRVESKYGPP

SEQ ID NO: 637 - protein, 233 aa, synthetic construct
EVQLVESGGGLVQPGGSLRLSCAASGFTVSNYEMNWVRQAPGKGLEWVSYISSSTSNIYYADSVKGRFTISRDNAENSLYLQMNSLRVEDTAVYYCVRDGIVVVPVGRGYYYYGLDVWGQGTTVTVSSASTKGPSVFPLAPCSRSTSESTAALGCLVKDYFPEPVTVSWNSGALTSGVHTFPAVLQSSGLYSLSSVVTVPSSSLGTKTYTCNVDHKPSNTKVDKRVESKYGPP

SEQ ID NO: 638 - protein, 231 aa, synthetic construct
QVQLVESGGGVVQPGRSLRLSCAASGFPFSNYVMYWVRQAPGKGLEWVALIFFDGKKNYHADSVKGRFTITRDNSKNMLYLQMNSLRPEDAAVYYCAKIHCPNGVCYKGYYGMDVWGQGTTVTVSSASTKGPSVFPLAPCSRSTSESTAALGCLVKDYFPEPVTVSWNSGALTSGVHTFPAVLQSSGLYSLSSVVTVPSSSLGTKTYTCNVDHKPSNTKVDKRVESKYGPP

SEQ ID NO: 639 - protein, 700 aa, synthetic construct
HHHHHHEQKLISEEDLGGEQKLISEEDLCKGVEPKTECERLAGTESPVREEPGEDFPAARRLYWDDLKRKLSEKLDSTDFTGTIKLLNENSYVPREAGSQKDENLALYVENQFREFKLSKVWRDQHFVKIQVKDSAQNSVIIVDKNGRLVYLVENPGGYVAYSKAATVTGKLVHANFGTKKDFEDLYTPVNGSIVIVRAGKITFAEKVANAESLNAIGVLIYMDQTKFPIVNAELSFFGHAHLGTGDPYTPGFPSFNHTQFPPSRSSGLPNIPVQTISRAAAEKLFGNMEGDCPSDWKTDSTCRMVTSESKNVKLTVSNVLKEIKILNIFGVIKGFVEPDHYVVVGAQRDAWGPGAAKSGVGTALLLKLAQMFSDMVLKDGFQPSRSIIFASWSAGDFGSVGATEWLEGYLSSLHLKAFTYINLDKAVLGTSNFKVSASPLLYTLIEKTMQNVKHPVTGQFLYQDSNWASKVEKLTLDNAAFPFLAYSGIPAVSFCFCEDTDYPYLGTTMDTYKELIERIPELNKVARAAAEVAGQFVIKLTHDVELNLDYERYNSQLLSFVRDLNQYRADIKEMGLSLQWLYSARGDFFRATSRLTTDFGNAEKTDRFVMKKLNDRVMRVEYHFLSPYVSPKESPFRHVFWGSGSHTLPALLENLKLRKQNNGAFNETLFRNQLALATWTIQGAANALSGDVWDIDNEF

SEQ ID NO: 640 - protein, 28 aa, synthetic construct
EQKLISEEDLGGEQKLISEEDLHHHHHH

SEQ ID NO: 641 - protein, 28 aa, synthetic construct
HHHHHHEQKLISEEDLGGEQKLISEEDL

SEQ ID NO: 642 - DNA, 20 bp, synthetic construct
  source 1..20: mol_type = other DNA
gctgcattgcggactgtaga

SEQ ID NO: 643 - DNA, 23 bp, synthetic construct
  source 1..23: mol_type = other DNA
tccatcattctcagctgctacaa

SEQ ID NO: 644 - protein, 1168 aa, synthetic construct
MHRPRRRGTRPPPLALLAALLLAARGADADIQMTQSPSSVSASVGDRVTITCRASQGIASWLAWYQQKPGKAPELLIYAASSLQGGVPSRFSGSGSGTDFTLTISSLQPEDFAIYYCQQANYFPWTFGQGTKVEIKGGGGSGGGGSGGGGSQITLKESGPTLVKPTQTLTLTCTFSGFSLSTSGVGVVWIRQPPGKALEWLALIYWNDHKRYSPSLGSRLTITKDTSKNQVVLTMTNMDPVDTATYYCAHYSGSYSYYYYGLDVWGQGTTVTVSSGGGGSGGGGSAHPGRPRAVPTQCDVPPNSRFDCAPDKAITQEQCEARGCCYIPAKQGLQGAQMGQPWCFFPPSYPSYKLENLSSSEMGYTATLTRTTPTFFPKDILTLRLDVMMETENRLHFTIKDPANRRYEVPLETPHVHSRAPSPLYSVEFSEEPFGVIVRRQLDGRVLLNTTVAPLFFADQFLQLSTSLPSQYITGLAEHLSPLMLSTSWTRITLWNRDLAPTPGANLYGSHPFYLALEDGGSAHGVFLLNSNAMDVVLQPSPALSWRSTGGILDVYIFLGPEPKSVVQQYLDVVGYPFMPPYWGLGFHLCRWGYSSTAITRQVVENMTRAHFPLDVQWNDLDYMDSRRDFTFNKDGFRDFPAMVQELHQGGRRYMMIVDPAISSSGPAGSYRPYDEGLRRGVFITNETGQPLIGKVWPGSTAFPDFTNPTALAWWEDMVAEFHDQVPFDGMWIDMNEPSNFIRGSEDGCPNNELENPPYVPGVVGGTLQAATICASSHQFLSTHYNLHNLYGLTEAIASHRALVKARGTRPFVISRSTFAGHGRYAGHWTGDVWSSWEQLASSVPEILQFNLLGVPLVGADVCGFLGNTSEELCVRWTQLGAFYPFMRNHNSLLSLPQEPYSFSEPAQQAMRKALTLRYALLPHLYTLFHQAHVAGETVARPLFLEFPKDSSTWTVDHQLLWGEALLITPVLQAGKAEVTGYFPLGTWYDLQTVPVEALGSLPPPPAAPREPAIHSEGQWVTLPAPLDTINVHLRAGYIIPLQGPGLTTTESRQQPMALAVALTKGGEARGELFWDDGESLEVLERGAYTQVIFLARNNTIVNELVRVTSEGAGLQLQKVTVLGVATAPQQVLSNGVPVSNFTYSPDTKVLDICVSLLMGEQFLVSWC

SEQ ID NO: 645 - protein, 1171 aa, synthetic construct
MHRPRRRGTRPPPLALLAALLLAARGADADIQMTQSPSSLSASVGDRVTITCRASQSISSYLNWYQQKPGKAPKLLIYAASSLQSGVPSRFSGSGSGTDFTLTISSLQPEDFATYYCQQSYSTPPITFGQGTRLEIKGGGGSGGGGSGGGGSQVQLVESGGGVVQPGRSLRLSCAASGFPFSNYVMYWVRQAPGKGLEWVALIFFDGKKNYHADSVKGRFTITRDNSKNMLYLQMNSLRPEDAAVYYCAKIHCPNGVCYKGYYGMDVWGQGTTVTVSSGGGGSGGGGSAHPGRPRAVPTQCDVPPNSRFDCAPDKAITQEQCEARGCCYIPAKQGLQGAQMGQPWCFFPPSYPSYKLENLSSSEMGYTATLTRTTPTFFPKDILTLRLDVMMETENRLHFTIKDPANRRYEVPLETPHVHSRAPSPLYSVEFSEEPFGVIVRRQLDGRVLLNTTVAPLFFADQFLQLSTSLPSQYITGLAEHLSPLMLSTSWTRITLWNRDLAPTPGANLYGSHPFYLALEDGGSAHGVFLLNSNAMDVVLQPSPALSWRSTGGILDVYIFLGPEPKSVVQQYLDVVGYPFMPPYWGLGFHLCRWGYSSTAITRQVVENMTRAHFPLDVQWNDLDYMDSRRDFTFNKDGFRDFPAMVQELHQGGRRYMMIVDPAISSSGPAGSYRPYDEGLRRGVFITNETGQPLIGKVWPGSTAFPDFTNPTALAWWEDMVAEFHDQVPFDGMWIDMNEPSNFIRGSEDGCPNNELENPPYVPGVVGGTLQAATICASSHQFLSTHYNLHNLYGLTEAIASHRALVKARGTRPFVISRSTFAGHGRYAGHWTGDVWSSWEQLASSVPEILQFNLLGVPLVGADVCGFLGNTSEELCVRWTQLGAFYPFMRNHNSLLSLPQEPYSFSEPAQQAMRKALTLRYALLPHLYTLFHQAHVAGETVARPLFLEFPKDSSTWTVDHQLLWGEALLITPVLQAGKAEVTGYFPLGTWYDLQTVPVEALGSLPPPPAAPREPAIHSEGQWVTLPAPLDTINVHLRAGYIIPLQGPGLTTTESRQQPMALAVALTKGGEARGELFWDDGESLEVLERGAYTQVIFLARNNTIVNELVRVTSEGAGLQLQKVTVLGVATAPQQVLSNGVPVSNFTYSPDTKVLDICVSLLMGEQFLVSWC

SEQ ID NO: 646 - protein, 1164 aa, synthetic construct
MHRPRRRGTRPPPLALLAALLLAARGADADIQMTQSPSSLSASVGDRVTITCRASQSISSYLNWYQQKPGKAPKLLIYAASSLQSGVPSRFSGSGSGTDFTLTISSLQPEDFATYYCQQSYSTPPITFGQGTRLEIKGGGGSGGGGSGGGGSEVQLVESGGGLVQPGGSLRLSCAASGFTFNIFEMNWVRQAPGKGLEWISYISSRGTTTYYADSVRGRFTISRDNAKNSLYLQMNSLRAEDTAVYYCARDYEATIPFDFWGQGTLVTVSSGGGGSGGGGSAHPGRPRAVPTQCDVPPNSRFDCAPDKAITQEQCEARGCCYIPAKQGLQGAQMGQPWCFFPPSYPSYKLENLSSSEMGYTATLTRTTPTFFPKDILTLRLDVMMETENRLHFTIKDPANRRYEVPLETPHVHSRAPSPLYSVEFSEEPFGVIVRRQLDGRVLLNTTVAPLFFADQFLQLSTSLPSQYITGLAEHLSPLMLSTSWTRITLWNRDLAPTPGANLYGSHPFYLALEDGGSAHGVFLLNSNAMDVVLQPSPALSWRSTGGILDVYIFLGPEPKSVVQQYLDVVGYPFMPPYWGLGFHLCRWGYSSTAITRQVVENMTRAHFPLDVQWNDLDYMDSRRDFTFNKDGFRDFPAMVQELHQGGRRYMMIVDPAISSSGPAGSYRPYDEGLRRGVFITNETGQPLIGKVWPGSTAFPDFTNPTALAWWEDMVAEFHDQVPFDGMWIDMNEPSNFIRGSEDGCPNNELENPPYVPGVVGGTLQAATICASSHQFLSTHYNLHNLYGLTEAIASHRALVKARGTRPFVISRSTFAGHGRYAGHWTGDVWSSWEQLASSVPEILQFNLLGVPLVGADVCGFLGNTSEELCVRWTQLGAFYPFMRNHNSLLSLPQEPYSFSEPAQQAMRKALTLRYALLPHLYTLFHQAHVAGETVARPLFLEFPKDSSTWTVDHQLLWGEALLITPVLQAGKAEVTGYFPLGTWYDLQTVPVEALGSLPPPPAAPREPAIHSEGQWVTLPAPLDTINVHLRAGYIIPLQGPGLTTTESRQQPMALAVALTKGGEARGELFWDDGESLEVLERGAYTQVIFLARNNTIVNELVRVTSEGAGLQLQKVTVLGVATAPQQVLSNGVPVSNFTYSPDTKVLDICVSLLMGEQFLVSWC

SEQ ID NO: 647 - protein, 1166 aa, synthetic construct
MHRPRRRGTRPPPLALLAALLLAARGADADIQMTQSPSSLSASVGDRVTITCRASQSISSYLNWYQQKPGKAPKLLIYAASSLQSGVPSRFSGSGSGTDFTLTISSLQPEDFATYYCQQSYSTPPITFGQGTRLEIKGGGGSGGGGSGGGGSEVQLVESGGGLVQPGRSLRLSCAASGFTFDDYAMNWVRQAPGKGLEWVSGISWSSGSMDYADSVKGRFTISRDNAKNSLYLQMNSLRTEDTALYYCAKAREVGDYYGMDVWGQGTTVTVSSGGGGSGGGGSAHPGRPRAVPTQCDVPPNSRFDCAPDKAITQEQCEARGCCYIPAKQGLQGAQMGQPWCFFPPSYPSYKLENLSSSEMGYTATLTRTTPTFFPKDILTLRLDVMMETENRLHFTIKDPANRRYEVPLETPHVHSRAPSPLYSVEFSEEPFGVIVRRQLDGRVLLNTTVAPLFFADQFLQLSTSLPSQYITGLAEHLSPLMLSTSWTRITLWNRDLAPTPGANLYGSHPFYLALEDGGSAHGVFLLNSNAMDVVLQPSPALSWRSTGGILDVYIFLGPEPKSVVQQYLDVVGYPFMPPYWGLGFHLCRWGYSSTAITRQVVENMTRAHFPLDVQWNDLDYMDSRRDFTFNKDGFRDFPAMVQELHQGGRRYMMIVDPAISSSGPAGSYRPYDEGLRRGVFITNETGQPLIGKVWPGSTAFPDFTNPTALAWWEDMVAEFHDQVPFDGMWIDMNEPSNFIRGSEDGCPNNELENPPYVPGVVGGTLQAATICASSHQFLSTHYNLHNLYGLTEAIASHRALVKARGTRPFVISRSTFAGHGRYAGHWTGDVWSSWEQLASSVPEILQFNLLGVPLVGADVCGFLGNTSEELCVRWTQLGAFYPFMRNHNSLLSLPQEPYSFSEPAQQAMRKALTLRYALLPHLYTLFHQAHVAGETVARPLFLEFPKDSSTWTVDHQLLWGEALLITPVLQAGKAEVTGYFPLGTWYDLQTVPVEALGSLPPPPAAPREPAIHSEGQWVTLPAPLDTINVHLRAGYIIPLQGPGLTTTESRQQPMALAVALTKGGEARGELFWDDGESLEVLERGAYTQVIFLARNNTIVNELVRVTSEGAGLQLQKVTVLGVATAPQQVLSNGVPVSNFTYSPDTKVLDICVSLLMGEQFLVSWC

SEQ ID NO: 648 - DNA, 2649 bp, Homo sapiens
  source 1..2649: mol_type = other DNA
gcacaccccggccgtcccagagcagtgcccacacagtgcgacgtcccccccaacagccgcttcgattgcgcccctgacaaggccatcacccaggaacagtgcgaggcccgcggctgttgctacatccctgcaaagcaggggctgcagggagcccagatggggcagccctggtgcttcttcccacccagctaccccagctacaagctggagaacctgagctcctctgaaatgggctacacggccaccctgacccgtaccacccccaccttcttccccaaggacatcctgaccctgcggctggacgtgatgatggagactgagaaccgcctccacttcacgatcaaagatccagctaacaggcgctacgaggtgcccttggagaccccgcatgtccacagccgggcaccgtccccactctacagcgtggagttctccgaggagcccttcggggtgatcgtgcgccggcagctggacggccgcgtgctgctgaacacgacggtggcgcccctgttctttgcggaccagttccttcagctgtccacctcgctgccctcgcagtatatcacaggcctcgccgagcacctcagtcccctgatgctcagcaccagctggaccaggatcaccctgtggaaccgggaccttgcgcccacgcccggtgcgaacctctacgggtctcaccctttctacctggcgctggaggacggcgggtcggcacacggggtgttcctgctaaacagcaatgccatggatgtggtcctgcagccgagccctgcccttagctggaggtcgacaggtgggatcctggatgtctacatcttcctgggcccagagcccaagagcgtggtgcagcagtacctggacgttgtgggatacccgttcatgccgccatactggggcctgggcttccacctgtgccgctggggctactcctccaccgctatcacccgccaggtggtggagaacatgaccagggcccacttccccctggacgtccagtggaacgacctggactacatggactcccggagggacttcacgttcaacaaggatggcttccgggacttcccggccatggtgcaggagctgcaccagggcggccggcgctacatgatgatcgtggatcctgccatcagcagctcgggccctgccgggagctacaggccctacgacgagggtctgcggaggggggttttcatcaccaacgagaccggccagccgctgattgggaaggtatggcccgggtccactgccttccccgacttcaccaaccccacagccctggcctggtgggaggacatggtggctgagttccatgaccaggtgcccttcgacggcatgtggattgacatgaacgagccttccaacttcatcaggggctctgaggacggctgccccaacaatgagctggagaacccaccctacgtgcctggggtggttggggggaccctccaggcggccaccatctgtgcctccagccaccagtttctctccacacactacaacctgcacaacctctacggcctgaccgaagccatcgcctcccacagggcgctggtgaaggctcgggggacacgcccatttgtgatctcccgctcgacctttgctggccacggccgatacgccggccactggacgggggacgtgtggagctcctgggagcagctcgcctcctccgtgccagaaatcctgcagtttaacctgctgggggtgcctctggtcggggccgacgtctgcggcttcctgggcaacacctcagaggagctgtgtgtgcgctggacccagctgggggccttctaccccttcatgcggaaccacaacagcctgctcagtctgccccaggagccgtacagcttcagcgagccggcccagcaggccatgaggaaggccctcaccctgcgctacgcactcctcccccacctctacacactgttccaccaggcccacgtcgcgggggagaccgtggcccggcccctcttcctggagttccccaaggactctagcacctggactgtggaccaccagctcctgtggggggaggccctgctcatcaccccagtgctccaggccgggaaggccgaagtgactggctacttccccttgggcacatggtacgacctgcagacggtgccagtagaggcccttggcagcctcccacccccacctgcagctccccgtgagccagccatccacagcgaggggcagtgggtgacgctgccggcccccctggacaccatcaacgtccacctccgggctgggtacatcatccccctgcagggccctggcctcacaaccacagagtcccgccagcagcccatggccctggctgtggccctgaccaagggtggggaggcccgaggggagctgttctgggacgatggagagagcctggaagtgctggagcgaggggcctacacacaggtcatcttcctggccaggaataacacgatcgtgaatgagctggtacgtgtgaccagtgagggagctggcctgcagctgcagaaggtgactgtcctgggcgtggccacggcgccccagcaggtcctctccaacggtgtccctgtctccaacttcacctacagccccgacaccaaggtcctggacatctgtgtctcgctgttgatgggagagcagtttctcgtcagctggtgt

SEQ ID NO: 649 - DNA, 2649 bp, synthetic construct
  source 1..2649: mol_type = other DNA
gcccatcctggcagacctagagctgtgcccacacagtgtgatgtgcctccaaacagcagatttgactgtgcccctgacaaggccatcacacaagagcagtgtgaagccagaggctgctgttacatccctgccaagcaaggactgcaaggggctcagatgggacagccctggtgcttcttcccaccatcttaccccagctacaagctggaaaacctgagcagctctgagatgggctacactgctacactgaccagaaccacacctacattcttcccaaaggacatcctgacactgaggctggatgtgatgatggaaacagagaacaggctgcacttcaccatcaaggaccctgccaatagaagatatgaggtgcccctggaaacccctcatgtgcactctagagccccatctccactgtactctgtggaattttctgaggaaccctttggggtcatagtcagaaggcagctggatggcagagtgctgctgaacacaactgtggcccctctgttctttgctgatcagttcctgcagctgagcaccagcctgcctagccagtatatcacaggcctggcagagcacctgtctccactgatgctgagcacatcctggaccagaatcaccctgtggaacagagacctggctcccacacctggggccaacctgtatggctctcaccccttctatctggccctggaagatggtggttcagcccatggtgtctttctgctgaactccaatgccatggatgtggtgctgcagccctctcctgctctgtcttggagaagcactggtggcatcctggatgtgtacatctttctgggccctgagcctaagtctgtggtgcagcagtacctggatgttgtgggctaccccttcatgcctccttattggggcctgggcttccacctgtgcagatggggatacagcagcacagccatcaccagacaggttgtggaaaacatgaccagagcacacttcccactggatgtgcagtggaatgacctggactacatggacagcagaagggacttcaccttcaacaaggatggcttcagagacttccctgccatggtgcaagagctgcaccaaggtggtagaagatatatgatgattgtggacccagccatcagctcctctggaccagctggcagctacagaccctatgatgagggactgagaagaggggtgttcatcaccaatgagacaggccagcctctgattggcaaagtgtggccaggctccacagcctttccagatttcacaaaccccacagctctggcttggtgggaagatatggtggcagagttccatgatcaggtgccctttgatggcatgtggattgacatgaatgagcccagcaacttcatcaggggctctgaggatggatgccccaacaatgaactggaaaatcctccttatgtgcctggtgttgttggagggacactgcaggcagccacaatttgtgccagctctcaccagtttctgagcacccactacaacctgcacaatctgtatggcctgactgaggccattgccagccacagggctcttgtgaaggctagaggcaccagaccttttgtgatcagcaggtccacctttgctggccatggcagatatgctggccactggactggggatgtgtggtctagttgggagcagctggctagctctgtgcctgagatcctgcagttcaacctgctgggagtgccccttgttggagcagatgtgtgtggcttcctgggcaacacctcagaggaactgtgtgtcagatggactcagctgggagcattctaccctttcatgagaaaccacaacagcctgctgagcctgcctcaagagccttacagcttttctgagccagcacagcaggccatgagaaaggccctgactctgagatatgccctgctgcctcacctgtacaccctgttccatcaggctcatgtggctggggagactgtggctagacccctgttcctggaattccccaaggacagctccacctggacagtggatcatcagctgctgtggggagaagccctgctgattacacctgtgctgcaggctggcaaggctgaagtgacaggctacttccctcttggcacttggtatgacctgcagacagtgcctgtggaagctctgggatctctgcctccacctcctgctgctcctagagagcctgccattcactctgaaggccagtgggttaccctgcctgctccactggataccatcaatgtgcatctgagagcaggctacatcatccctctgcaaggccctggcctgaccaccacagaatctagacagcagccaatggcactggctgtggccctgaccaaaggtggagaagctagaggggagctgttctgggatgatggggagagcctggaagtgctggaaagaggggcctatacacaagtgatttttctggctaggaacaataccattgtgaatgagcttgtcagagtcacctctgaaggtgctggcctgcagctccagaaagtgacagtgcttggagtggccacagcaccccagcaagtgctgtctaatggggtgccagtgtccaacttcacatacagccctgataccaaggtcctggacatctgtgtgtccctgcttatgggagagcagttcctggtgtcttggtgc

SEQ ID NO: 650 - DNA, 3384 bp, synthetic construct
  source 1..3384: mol_type = other DNA
caggtccagctgcaagagtctggccccaaggtggtcaagccctctgagacactgagcctgacctgcacagtgtctggtggcagcatcagcagctactactggaactggatcagacagagccctggcaaaggcctggaatggattggctacaccaagagaggctacacagactacaaccccagcctgagaagcagagtgaccatctctgaggacaccagcaagaaccagttcagcctgaggatcagctctgtgacagctgctgacacagcagtgtactactgtgcccagatgggctggggcagccatgcctttgatatgtggggccagggcacaatggtggctgtgtccagtgggggctcaggaggaggtggctcaggaggtggaggttcaggaggggagattgtgctgacccagtctcctggcacactgtctctgagccctggggaaagagccacactgagctgtagagccagccagtctgtgtcctctagctacctggcctggtatcagcagaagcctggacaggctcccagactgctgatctatggggcctcttctagagccacaggcatccctgacagattcagtggcagtggctctggcacagacttcaccctgaccatcagcagactggaacctgaggactttgctgtgtactattgccagcagtatggcagcagcccctggacatttggacagggcaccaaggtggaaatcaaaggtggtggtggctctgcccatcctggcagacctagagctgtgcccacacagtgtgatgtgcctccaaacagcagatttgactgtgcccctgacaaggccatcacacaagagcagtgtgaagccagaggctgctgttacatccctgccaagcaaggactgcaaggggctcagatgggacagccctggtgcttcttcccaccatcttaccccagctacaagctggaaaacctgagcagctctgagatgggctacactgctacactgaccagaaccacacctacattcttcccaaaggacatcctgacactgaggctggatgtgatgatggaaacagagaacaggctgcacttcaccatcaaggaccctgccaatagaagatatgaggtgcccctggaaacccctcatgtgcactctagagccccatctccactgtactctgtggaattttctgaggaaccctttggggtcatagtcagaaggcagctggatggcagagtgctgctgaacacaactgtggcccctctgttctttgctgatcagttcctgcagctgagcaccagcctgcctagccagtatatcacaggcctggcagagcacctgtctccactgatgctgagcacatcctggaccagaatcaccctgtggaacagagacctggctcccacacctggggccaacctgtatggctctcaccccttctatctggccctggaagatggtggttcagcccatggtgtctttctgctgaactccaatgccatggatgtggtgctgcagccctctcctgctctgtcttggagaagcactggtggcatcctggatgtgtacatctttctgggccctgagcctaagtctgtggtgcagcagtacctggatgttgtgggctaccccttcatgcctccttattggggcctgggcttccacctgtgcagatggggatacagcagcacagccatcaccagacaggttgtggaaaacatgaccagagcacacttcccactggatgtgcagtggaatgacctggactacatggacagcagaagggacttcaccttcaacaaggatggcttcagagacttccctgccatggtgcaagagctgcaccaaggtggtagaagatatatgatgattgtggacccagccatcagctcctctggaccagctggcagctacagaccctatgatgagggactgagaagaggggtgttcatcaccaatgagacaggccagcctctgattggcaaagtgtggccaggctccacagcctttccagatttcacaaaccccacagctctggcttggtgggaagatatggtggcagagttccatgatcaggtgccctttgatggcatgtggattgacatgaatgagcccagcaacttcatcaggggctctgaggatggatgccccaacaatgaactggaaaatcctccttatgtgcctggtgttgttggagggacactgcaggcagccacaatttgtgccagctctcaccagtttctgagcacccactacaacctgcacaatctgtatggcctgactgaggccattgccagccacagggctcttgtgaaggctagaggcaccagaccttttgtgatcagcaggtccacctttgctggccatggcagatatgctggccactggactggggatgtgtggtctagttgggagcagctggctagctctgtgcctgagatcctgcagttcaacctgctgggagtgccccttgttggagcagatgtgtgtggcttcctgggcaacacctcagaggaactgtgtgtcagatggactcagctgggagcattctaccctttcatgagaaaccacaacagcctgctgagcctgcctcaagagccttacagcttttctgagccagcacagcaggccatgagaaaggccctgactctgagatatgccctgctgcctcacctgtacaccctgttccatcaggctcatgtggctggggagactgtggctagacccctgttcctggaattccccaaggacagctccacctggacagtggatcatcagctgctgtggggagaagccctgctgattacacctgtgctgcaggctggcaaggctgaagtgacaggctacttccctcttggcacttggtatgacctgcagacagtgcctgtggaagctctgggatctctgcctccacctcctgctgctcctagagagcctgccattcactctgaaggccagtgggttaccctgcctgctccactggataccatcaatgtgcatctgagagcaggctacatcatccctctgcaaggccctggcctgaccaccacagaatctagacagcagccaatggcactggctgtggccctgaccaaaggtggagaagctagaggggagctgttctgggatgatggggagagcctggaagtgctggaaagaggggcctatacacaagtgatttttctggctaggaacaataccattgtgaatgagcttgtcagagtcacctctgaaggtgctggcctgcagctccagaaagtgacagtgcttggagtggccacagcaccccagcaagtgctgtctaatggggtgccagtgtccaacttcacatacagccctgataccaaggtcctggacatctgtgtgtccctgcttatgggagagcagttcctggtgtcttggtgc

SEQ ID NO: 651 - DNA, 2649 bp, synthetic construct
  source 1..2649: mol_type = other DNA
gcacatccaggcaggcccagagcagttcccacacaatgtgatgtcccccccaactcaaggtttgattgtgcccctgataaggctatcactcaggaacagtgtgaagctaggggctgttgctacattcctgcaaagcagggactgcagggagcccagatggggcagccttggtgctttttcccaccatcttaccccagctacaaactagagaacctgagctcctctgaaatgggctacactgccactctaaccagaaccacccccactttctttcccaaggacatcctgaccctgagactagatgtgatgatggagactgagaataggctccactttactatcaaagatccagctaacaggaggtatgaggtgcctttggagacaccccatgtccacagcagagcaccctccccactctacagtgttgagtttagtgaggaaccttttggtgtgatagttaggagacagttggatggtagggtgctgttgaacacaactgtggcacccctgttctttgcagaccaattccttcagttgtccacctccctgccttcacagtatatcacaggcctggcagagcacctcagtcccttgatgctctcaacctcttggactagaatcaccctctggaacagggaccttgcacccacacctggtgcaaacctctatgggtctcaccctttttacttggcactggaagatggagggtctgcacatggggtgttcttactaaattcaaatgccatggatgtggtcctgcagccaagccctgcccttagctggaggagcacaggtgggatattggatgtctacattttcctgggcccagagccaaagtcagtggtgcaacagtacctggatgttgttggatatccctttatgcctccatactggggcctgggcttccacctgtgcaggtggggctacagttccacagctataaccagacaggtggtggagaacatgacaagagcccacttcccactggatgtccaatggaatgatctggattatatggattccaggagggacttcacatttaataaggatggcttcagggactttccagccatggtgcaggagctgcatcagggaggcaggagatatatgatgatagtggatcctgccatcagcagcagtggccctgcagggtcatacaggccctatgatgagggtctgaggaggggagtttttataaccaatgagacaggccaacccctgattgggaaagtatggccaggatccactgcttttccagacttcaccaaccccacagccttagcctggtgggaggacatggtggctgagttccatgaccaggttccctttgatggcatgtggattgatatgaatgaacctagtaactttataaggggctctgaagatggctgccccaataatgaactggagaatccaccctatgtgcctggggtggttggggggactctccaggcagccaccatatgtgcatcctcacatcagtttctctccacacactacaaccttcataacctctatggccttacagaagccatagcatcccatagggcactggttaaggctagggggacaaggccatttgtgatctccaggagtacttttgctggccatggcaggtatgctggccattggacaggggatgtgtggtcatcctgggagcagctggcctccagtgttccagaaatactgcagtttaatcttttgggggttcctctggttggggcagatgtatgtggctttctgggcaacacctcagaagaactgtgtgttaggtggacccagctaggtgccttctaccccttcatgaggaatcacaatagcctattaagtctgccacaggagccatattctttcagtgagccagcccaacaggctatgaggaaagccctcaccctgaggtatgcactcctcccccacctttacacattattccaccaggcccatgtggcaggagagacagtggccaggcccctcttccttgaattccccaaagattctagcacctggactgtggaccatcagctcctgtggggggaggcactgctcatcacaccagtgttacaggcagggaaggctgaagtgactggctattttccattgggcacatggtatgacctgcagactgtgccagtagaagcccttggcagcctcccacccccacctgcagctccaagggaaccagccatccacagtgaggggcaatgggtaacactgccagctcccctggacaccatcaatgtccaccttagggctgggtacattattcccttgcagggccctggcttaacaaccacagagtctagacaacagcctatggctctggctgtggccctgaccaagggtggagaggccaggggggagttgttctgggatgatggagaaagcctggaagtgctagagaggggggcctacacacaggtcatttttctggctaggaataatacaattgtgaatgaacttgtaagggtgacaagtgagggagctggcctacagctgcagaaggtgactgtcctgggagtggccacagcacctcagcaagtcctctctaatggtgtccctgtctccaatttcacttacagcccagacaccaaagtcctggacatttgtgtcagcctgttgatgggagagcagtttcttgtctcctggtgt

SEQ ID NO: 652 - DNA, 2649 bp, synthetic construct
  source 1..2649: mol_type = other DNA
gcacaccctgggagacccagggcagtacctacccagtgtgatgttcctcccaacagtagatttgactgtgctccagacaaggccatcacacaggaacaatgtgaggccagaggttgctgctacatccctgctaagcaagggctccagggggcccagatggggcagccttggtgcttcttcccacccagctacccctcctacaaactggagaacctgagctcctctgagatgggctacactgccaccctgactagaacaacacctacctttttccctaaggacatcctgactctgaggttagatgtgatgatggaaactgaaaacaggctgcacttcaccatcaaggaccctgccaacaggagatatgaagttcctctggagacacctcatgttcacagcagagccccttcacccctgtattctgtggaattctctgaagaaccatttggagttatagtgagaagacaactggatggcagagtgctcctgaacacaacagtggcccctctgttctttgctgaccagtttctgcagctgagcactagcctgccttcccagtatatcactggcctggctgagcaccttagccctctgatgctcagcacatcttggactagaataacactatggaacagagacctggctccaaccccaggtgctaatctgtatggcagtcatcctttctacctggctctggaggatggagggtctgcccatggtgtgttcctgctgaactcaaatgcaatggatgttgtgttacagcctagccctgcattgagctggagaagtacaggtggaattctggatgtctacatattcttggggcctgagcctaagtctgtagtgcaacagtacctggatgttgttggctacccatttatgcctccctactggggcctaggattccacctgtgcagatggggctactccagtactgccatcaccagacaggtggttgagaacatgaccagggcccactttcctttagatgtgcagtggaatgatctggactacatggatagcagaagggacttcaccttcaacaaggatggttttagagacttccctgccatggtccaggagttgcaccaggggggcagaagatacatgatgatagtagacccagctatcagcagttcaggcccagcagggagctacaggccctatgatgagggcctgagaagaggtgtcttcatcactaatgagacaggccagccactgattggcaaagtgtggcctggctcaactgctttccctgatttcacaaaccctacagccttagcatggtgggaggatatggtggctgaattccatgaccaggtgccatttgatggcatgtggattgacatgaatgagccaagcaacttcatcagaggctctgaggatggctgccccaacaatgaactggaaaaccctccctatgtcccaggagtggtgggaggaaccctgcaggcagctacaatctgtgcctcttcccaccagttcctaagcacccactacaacctccataacctgtatgggttgacagaggccatagcctcccacagagccctggtcaaggctagaggcactaggccatttgtcatctctagatctacctttgctggccatggcaggtatgcaggccactggacaggtgatgtgtggagcagctgggaacaacttgccagcagtgtacctgagatcctccaatttaacctgctgggtgttcccctagtgggagctgatgtatgtgggttcctgggcaatacatcagaagagctctgtgtaaggtggacccagctaggggccttttacccattcatgagaaaccacaactctctcctgagccttccacaagaaccttactctttctctgagcctgctcagcaagccatgaggaaagcactgacattaagatatgcactgctgcctcacctttacaccctgttccaccaggcacatgtggcaggagaaacagtagccagacccctgttcttagagtttcccaaggactcttcaacctggactgtggaccaccagctcctatggggagaggccctgttaatcacccctgtgctgcaggctggtaaggctgaagttacaggctactttcccttaggcacatggtatgatttgcagacagtccctgtggaggccctgggatctcttcctcctcccccagctgctcctagggagcctgcaatccactctgagggacagtgggtaaccctcccagctccactggacaccatcaatgtacaccttagggctggatacattatccccctgcaaggccctggcctgaccacaacagagagcaggcagcagcctatggccctagctgttgcccttaccaagggaggggaagccagaggagagctcttctgggatgatggagagagccttgaagtgcttgaaaggggggcctacacacaagtgatcttcctggccagaaacaacactattgtgaatgagttggtgagagtcacaagtgaaggggctggtcttcaactccagaaagtgactgtgttaggagttgcaacagcaccacagcaggttctctctaatggggtaccagtgtctaacttcacatacagccctgacaccaaggtgctggacatctgtgtgtctttattgatgggtgaacagttcctggtgtcttggtgc

SEQ ID NO: 653 - DNA, 2649 bp, synthetic construct
  source 1..2649: mol_type = other DNA
gcacaccctggcaggcccagagcagtgcccacacagtgtgatgtcccaccaaatagcaggtttgattgtgcccctgacaaggctattacccaggaacagtgtgaagccagaggctgttgctacatccctgcaaaacaggggttgcagggagcacagatggggcagccctggtgcttcttcccaccatcttacccaagctataagttagaaaatctgtcatcctctgaaatgggctacactgccaccttgacaaggaccacccccacattcttccccaaagacatcctgacccttaggctggatgtgatgatggagactgagaacaggctccactttactatcaaagatccagctaacaggaggtatgaggtgcccttggagactcctcatgtccattcaagggcaccttccccactctactcagtggagttttcagaggagccctttggggttattgtgaggagacagctggatggcagagtgctgctgaacactactgtggcccctctgttctttgctgaccagttccttcagctgtcaacttctctgccatcacagtatatcacaggcctagctgagcacctcagtcccctgatgctcagcaccagctggacaagaattactctttggaacagagaccttgcacccactccaggtgctaatctctatgggtctcaccctttctacctggccctagaggatgggggctcagcacatggggtgttcttgctaaatagcaatgccatggatgtggtcttacagccttctcctgcccttagctggaggtctacaggtggaatactggatgtctacatctttctgggcccagagcccaagtctgttgtgcagcaatacctggatgttgtaggatatccctttatgccaccatattggggactgggcttccatttatgcaggtggggctactcctccactgctattaccaggcaagtggttgaaaacatgacaagggcccactttcccctggatgtacagtggaatgatcttgattacatggactccaggagggactttacatttaataaagatggcttcagggatttccctgccatggtgcaggagctgcaccagggaggcaggaggtacatgatgatagtggatcctgccatcagcagctcaggccctgctgggtcatataggccttatgatgaaggtcttaggaggggggtttttattaccaatgaaactggccaaccacttattggcaaggtatggcctggttcaactgccttccctgacttcaccaaccccacagccctggcctggtgggaggatatggtggctgaatttcatgaccaggttccttttgatggcatgtggattgatatgaatgagccttccaactttatcaggggctctgaagatggctgccccaataatgagctggagaacccaccctatgttcctggggtggttgggggtaccctccaggctgccactatctgtgcctccagccatcagtttctctccacacactacaacttgcacaacctctatggcctgactgaagccattgcctctcatagggctttggttaaggctagggggacaagaccatttgtgatctccaggtcaacttttgctggccatggcaggtatgctggccattggactggtgatgtgtggagctcctgggagcaactagcttcatcagtgccagaaatcctgcagtttaatctgctaggggttcctctggttggtgctgatgtctgtggctttttgggcaacacctcagaggaactatgtgtgaggtggacccagctgggagccttctaccccttcatgaggaaccataacagcctgctcagtctgccccaggagccttactcattctcagagcctgcccagcaggctatgaggaaggccctcaccctgaggtatgcactcctcccccacctctacacactgttccaccaagcccatgtagctggggaaactgttgccaggcccctctttctggaattccccaaggactctagcacctggactgtggatcatcaactcctttggggggaagcccttctcatcacaccagtgctccaggctgggaaagctgaagtgactggctatttccccttgggcacatggtatgacctgcagactgtgccagtagaggcccttggctctttaccacccccacctgcagctccaagggaaccagcaatccactctgagggtcagtgggtgactttgcctgcccccttagacacaataaatgtccacctcagagctgggtacatcattcccctgcagggtcctggcctcacaaccacagagtccaggcaacagcccatggctctggctgtggccctgacaaagggtggggaggccaggggggagcttttctgggatgatggagagagcctggaagtgctggagaggggggcctacacacaggtcatattcctggctaggaataacactatagtgaatgaattggtaagggtgaccagtgagggagctggcttgcagctgcagaaggtgactgtcctgggggtggccactgcaccccagcaggtcctttccaatggtgtccctgtctccaacttcacttacagccctgacaccaaggtcttggacatttgtgtttcattattgatgggagagcagtttctagtgagctggtgt

SEQ ID NO: 654 - DNA, 2649 bp, synthetic construct
  source 1..2649: mol_type = other DNA
gcccaccctggcaggcctagagctgtgcctacacaatgtgatgtgccacctaacagcagatttgactgtgcacctgacaaggccataacccaggaacagtgtgaggctagagggtgctgctacatccctgctaagcagggactgcaaggagctcagatgggtcagccctggtgcttctttcccccatcctaccctagttacaaactagaaaatctgagcagttctgagatgggctacacagccaccctgactagaaccactccaaccttcttcccaaaggacatcttaactctcagactggatgtaatgatggaaactgagaatagattgcacttcactatcaaagacccagccaacagaagatatgaagttcctctagaaacacctcatgtgcactctagagccccttcccctctgtacagtgtagagttctctgaagagccttttggggtgattgttagaaggcagttggatgggagggtgctgttgaacaccacagtggcccccctgttctttgctgaccagttccttcagctgagtacttctctcccaagtcagtatatcacaggtctggctgagcacctgtcccctctcatgctgtctaccagctggacaagaataaccctatggaacagagacctggcaccaacccctggagcaaacttgtatggcagccaccccttctaccttgccctggaggatggtggcagtgcacatggggtgttcctcctcaactccaatgccatggatgtggttctgcaaccctctcctgccctcagctggagaagcacaggaggcattctagatgtctacatcttcctgggccctgaaccaaagtctgtggtccaacaatacctggatgttgtgggatacccctttatgcccccttactggggattaggcttccacctgtgcagatggggttactcaagcacagcaattaccagacaggtggttgagaacatgaccagggctcacttccctttagatgtgcagtggaatgacctggactacatggacagcagaagggactttaccttcaacaaagatggattcagggacttccctgccatggtacaggagctacaccaaggaggcagaagatacatgatgattgttgacccagcaatttcttcctctggcccagcaggcagctacagaccctatgatgagggcctgagaagaggggtgttcatcacaaatgagacaggccaacctctgataggcaaagtgtggcctgggtccactgccttcccagacttcacaaaccccactgcactggcatggtgggaagacatggtggctgagttccatgaccaggtgccttttgatgggatgtggattgatatgaatgagccctctaactttatcagaggaagtgaggatggctgccccaacaatgaacttgagaaccctccttatgttcctggagtggtaggaggcactttgcaggcagccaccatctgtgccagctcacaccagttcctgtccactcactacaacctgcacaacctatatggacttacagaggccatagcttctcacagagccttagtgaaggccagaggcactaggccttttgtcatcagcaggtcaacctttgcaggccatggcagatatgctggccactggactggggatgtttggagttcttgggaacaactggccagctcagtgccagagatcctgcagtttaacctgctgggggtgcctctggtgggagctgatgtatgtggtttcctgggtaacacctctgaggagctctgtgtaagatggacccagttgggagctttctaccctttcatgagaaaccacaactctctcctcagcttgccccaggagccctacagcttttctgaaccagcccagcaggctatgaggaaggcactgacactgagatatgctctactgcctcacctctacaccctattccaccaagcccatgtggcaggtgaaacagtggccaggcccctgttcttagagttccctaaggactcaagtacctggacagttgaccaccagctgttgtggggtgaggccctgctcatcaccccagtactccaggctggaaaggcagaggttactggctacttccctctgggcacctggtatgacctgcagacagtccctgtggaggctctggggtcactgcctccccctccagctgctccaagagaacctgccatccacagtgaaggccaatgggtaaccttgcctgcccctttagacacaatcaatgtgcacttgagagcaggctatatcataccactgcaaggaccaggcctaacaactacagagagcagacagcaacctatggctctggcagttgctttgactaagggtggtgaagcaagaggggaactgttctgggatgatggagaatctctggaagtgttagagagaggagcatacactcaggtgatcttcttagccaggaacaacaccattgtgaatgaactggttagggtgacaagtgaaggtgcaggactgcagctgcagaaggtgactgtcttaggtgtagccacagctccacaacaagtgctgtccaatggtgttcctgtcagcaacttcacctactctcctgacaccaaggttctggacatctgtgtgagcctccttatgggtgagcagtttctagtctcttggtgc

SEQ ID NO: 655 - DNA, 2649 bp, synthetic construct
  source 1..2649: mol_type = other DNA
gcacatccaggcaggcccagagcagtgcccacacaatgtgatgtcccccctaattcaaggtttgattgtgcccctgacaaggccatcactcaggaacagtgtgaagctaggggctgttgctatatccctgcaaagcagggtctgcagggagctcagatggggcagccctggtgcttctttccacccagctaccccagctacaaactggagaatctgagctcatctgaaatgggctacactgccaccctgaccaggacaacccccaccttcttccccaaagacatattgactcttagacttgatgtgatgatggagactgaaaacaggttacatttcactattaaagatccagctaacaggaggtatgaggttcccttggagactccacatgttcacagcagggcaccttccccactttactctgtggagttcagtgaagagccctttggtgtgattgtgaggaggcagctggatggcagggtactgttgaacactactgtggctcccttgttctttgctgaccagttccttcagctgtccaccagcctgccctcccagtatatcacaggcttagctgagcacctcagtcccctgatgttgagcacatcatggaccaggattaccctttggaacagggatcttgctcccactcctggtgctaacctctatgggtctcaccctttctatctggctttggaggatggtgggagtgcacatggggtgttcctgctaaatagcaatgccatggatgtggtcctacagcctagccctgccctttcttggaggtctacaggtgggatattagatgtttacatttttctgggaccagaacctaagtcagtagtgcagcagtacctagatgttgtgggatatccttttatgcctccatactggggattaggctttcatctgtgcaggtggggctattcctcaactgctattaccaggcaggtggtggagaacatgaccagagcccattttcccttagatgtccagtggaatgatctggactatatggactccaggagggactttacattcaacaaggatggcttcagggattttcctgccatggtgcaggaactccaccagggtggtaggaggtatatgatgatagttgatcctgctatcagcagcagtggccctgctgggagctacaggccatatgatgagggtctgaggaggggtgttttcataacaaatgagactggccagcctcttattgggaaagtatggcctggttccactgccttccctgatttcaccaatcctacagccctggcctggtgggaggacatggtggctgagttccatgaccaggtgccttttgatggcatgtggattgacatgaatgaaccttccaacttcatcaggggctctgaggatggctgccctaacaatgagctggagaacccaccctatgtgcctggggtggttggggggacactccaggctgctactatatgtgcctccagccaccagtttctctctacacactacaatctgcacaacctctatggcctgactgaagcaattgcctcccacagggctctggtgaaggctagggggacaaggccatttgtgatatccagatccacctttgctggacatggcaggtatgcaggccactggactggggatgtgtggagctcctgggagcagttggcctctagtgtgccagaaattctgcagtttaatctgctgggggttcctctagtaggggctgatgtctgtggctttcttggcaacacctcagaggaactgtgtgtgaggtggactcagctgggggctttctacccctttatgagaaaccacaattcactgctcagtctgccccaggagccatattctttcagtgagcctgcccaacaagccatgaggaaggccctcaccctgaggtatgcacttctcccacacctctatacactgtttcatcaggcccatgttgctggggaaactgttgcaaggcccctcttcctggagttccccaaagactctagcacctggactgtggatcatcaactcctttggggtgaggccttactcatcaccccagtgctccaagctgggaaggcagaagtgactggctacttccccttgggcacatggtatgatttgcagactgtgccagtagaagcccttggcagccttccacccccacctgcagctcctagggagccagccatccatagtgagggtcagtgggtgactctgccagcccccctggacactatcaatgtccacctcagggctgggtacattatccctctgcaaggccctggcctcacaaccacagaatccagacagcaacccatggccctagctgttgccttgaccaagggtggggaagccaggggtgagctcttttgggatgatggagagagcctggaagtgctggagaggggggcctacacacaggtcattttcctagccagaaataacactattgtgaatgaattggtaagggtgaccagtgagggagctggcctgcagctgcagaaggtgactgtccttggtgtggctactgctccacagcaggtcctctccaatggtgtccctgtctcaaattttacctattctccagacaccaaggtcttggacatctgtgtatccctgttgatgggagagcagtttttggttagctggtgt

SEQ ID NO: 656 - DNA, 2649 bp, synthetic construct
  source 1..2649: mol_type = other DNA
gcacaccctggcagacctagagctgttcccacacagtgtgatgtccctcctaacagcagatttgactgtgccccagacaaagctatcacccaggagcagtgtgaggctaggggctgctgctacatccctgccaagcagggcctgcaaggagcccaaatgggccagccctggtgtttctttcccccctcttacccatcctacaagctagaaaacctcagctcatctgagatgggatacacagctaccctgaccagaaccacccccaccttcttccctaaggatatactgacattgagactggatgtgatgatggaaactgagaacagactccacttcaccatcaaggatcctgctaacagaaggtatgaggtgcccctggagacacctcatgtccacagtagagcccctagcccactatactctgtggagttctcagaagagccttttggtgtgatagttagaagacaactggatgggagagtgttgctaaatactactgttgctcccttattttttgctgaccagttcttgcagttatccacctctctcccctctcagtacatcacagggctggctgagcacctttcccctctgatgttgtccacttcttggacaagaatcaccttgtggaatagggaccttgccccaactcctggtgccaacctgtatggcagccaccccttctacctggccctggaggatggaggctctgcccatggagtgttcctgctgaactccaatgccatggatgttgtgctgcagccatctcctgccctgtcctggaggagtacaggaggcatcctggatgtgtatatctttctgggacctgagcccaagtctgtggttcagcagtacctggatgtagtgggctaccccttcatgccaccttactggggtctgggcttccacctctgcaggtggggttacagtagcactgctatcactagacaagtggtggagaacatgaccagggcccacttccctctagatgtgcagtggaatgacttagactatatggatagcagaagggacttcacattcaacaaggatggcttcagggacttccctgcaatggtacaggagttacaccaggggggaagaagatacatgatgattgtggaccctgccattagctcttctggccctgcagggagctacaggccttatgatgaagggctgagaaggggtgtgttcattactaatgaaacaggccagcctttaattggcaaggtctggcctggcagtacagccttcccagacttcaccaaccctactgctctagcttggtgggaggacatggtggctgaatttcatgatcaagtgccttttgatggcatgtggattgacatgaatgagcctagcaacttcattagaggcagtgaagatggttgccctaacaatgagctggaaaatccaccctatgttccaggtgtggtaggaggcaccctacaagcagccaccatttgtgcctctagccaccagttcctgagcacccactataacttacataacctgtatggcctcacagaagccattgccagccacagagccttagtgaaagcaaggggcacaagaccctttgtaatctcaaggtccacctttgctggccatggcagatatgcaggccactggacaggtgatgtgtggagctcctgggagcagttagcctcttctgtgccagaaatcctgcagttcaatctcctgggagtgcctctggtgggagctgatgtttgtggctttctgggtaacacaagtgaagagctgtgtgtcaggtggacacagctgggagcattttaccccttcatgaggaaccacaactctttgctcagtctgcctcaagaaccctactccttctctgagcctgcccagcaggctatgagaaaggccctcacccttagatatgctctcctgcctcacctgtacaccctgttccaccaggcccatgttgctggggagactgtggctagaccacttttcttagagttccctaaggacagcagtacctggacagtagaccaccaactgttatggggggaggccctgctcattacccctgttctccaggcaggcaaggcagaagtgacagggtacttccctctgggcacctggtatgacctacagacagttcctgtggaggcccttggcagtctgccaccccctcctgctgcacctagagaacctgcaatccactcagaaggacaatgggttaccctccctgcccctctagacaccatcaatgtgcatttaagagcaggctacatcatacccttgcagggccctggcctgaccaccacagaatctagacagcagcccatggcactggctgttgccctaaccaagggaggagaggccagaggagagctgttctgggatgatggggagagtctggaggtcctggagagaggagcctacacccaggtgatctttcttgctagaaacaatactatagtgaatgagctagtgagagtgactagtgagggtgctggcctccagttgcagaaggtaacagtattaggagtggctacagcccctcagcaggtactgtccaatggtgtgcctgtttccaatttcacttactcccctgacactaaggtactggatatctgtgtgtccctgctgatgggagaacagtttctggtcagctggtgc

SEQ ID NO: 657 - DNA, 2649 bp, synthetic construct
  source 1..2649: mol_type = other DNA
gcacatcctggaaggcccagagcagtgcccacacagtgtgatgtcccccccaattctagatttgattgtgcccctgataaggctatcacccaagaacagtgtgaggccagaggctgttgctacatacctgcaaagcaagggcttcagggagctcagatggggcaaccctggtgctttttcccacctagctatcccagctacaagctggaaaacttgagctcctctgaaatgggctacactgccactctgaccaggaccacccccaccttcttccccaaagacatactgactcttagactagatgttatgatggagactgaaaataggctccattttacaatcaaagatccagctaacaggaggtatgaggttcctttggagacccctcatgtccatagcagagcaccatcaccactctactctgtggagttttctgaggaaccctttggggtgattgtgaggaggcagctagatggcagggtgctgttaaatacaactgtggctcccctgttctttgctgaccagtttcttcaactgtccacctccctgccctcccagtatattacaggcctggctgagcacctcagtcccttgatgctcagcaccagctggaccaggataaccttatggaacagggaccttgctccaactcctggtgcaaacctctatgggtctcatcctttctatctagctcttgaggatggggggtctgcacatggggtgttcctgctaaactctaatgcaatggatgttgtcctgcagccaagccctgccctttcttggaggtccacaggtgggatcctggatgtctacatcttcttgggcccagaacccaagtctgtggtgcagcagtaccttgatgttgtgggatacccttttatgcccccatactggggcctgggctttcatctgtgcaggtggggctactcctccactgctatcaccaggcaggtggtggagaacatgaccagggcccacttccctctggatgtccagtggaatgatctggattatatggattccaggagggatttcactttcaacaaagatggctttagggacttccctgccatggtgcaggagctgcaccagggtggcaggaggtatatgatgattgtggatcctgccataagcagctcaggccctgctgggagctacaggccatatgatgaaggtttgaggaggggggttttcataaccaatgagactggccagcctctgattgggaaggtatggcctgggtccactgcattccctgacttcaccaatcccacagctctggcctggtgggaggacatggtagctgagttccatgaccaggtgccctttgatggaatgtggattgacatgaatgaaccttccaacttcatcaggggctctgaggatggctgccccaacaatgagctggaaaacccaccctatgtgcctggggtggttggtgggaccttgcaagctgccaccatctgtgcctcctctcaccagtttctctccacacattacaatctgcacaatctctatggcctgactgaagccattgcttcccacagagctctggtgaaggctaggggcacaaggccatttgttatatcaaggtccacatttgctggccatggcaggtatgctggccactggacaggggatgtatggagctcctgggagcagcttgcatcctctgtgccagaaattctgcagtttaacttattaggggtgcctctggttggtgctgatgtctgtggcttccttggcaacacatcagaggagctttgtgtgaggtggactcagttaggggctttctacccattcatgaggaatcacaactcactcctcagtctaccccaggagccctattcattctctgagccagcccagcaggccatgaggaaggctctcaccctgaggtatgcactcctccctcatttgtacacactgtttcaccaggcccatgttgctggggaaactgttgccaggcccctcttcctggaattccccaaagactctagcacttggactgtggatcatcagctcctgtggggggaagccctgctcattactccagtgctacaggctggtaaggctgaagtgactggctacttccctttgggcacatggtatgacctgcagacagtgccagtagaggcccttggcagcctcccacctccacctgcagctcccagggagccagccatccactctgaaggacagtgggtgactctgcctgcccccttagacactattaatgttcacctcagggctggctacatcattcccctgcaaggccctggcctcacaaccacagaatccaggcagcaacccatggctttggctgtggccctgactaagggtggggaagccaggggggagcttttttgggatgatggagagagcctagaagtgttggagaggggggcctatacacaggtcatctttttggccaggaataatacaattgtgaatgagctggtaagggtgaccagtgaaggagctggactgcagctgcagaaggtgactgtacttggagtggctactgctccacagcaggttctatcaaatggtgtccctgtttccaatttcacctacagcccagacacaaaggtcctggacatttgtgtctccctgttgatgggagagcaatttttggtaagctggtgt

SEQ ID NO: 658 - DNA, 2649 bp, synthetic construct
  source 1..2649: mol_type = other DNA
gcccaccctggcagacctagagctgtgccaactcagtgtgatgtccctcctaactctagatttgattgtgctccagacaaggccatcacccaggagcagtgtgaagctaggggctgctgctacatccctgccaagcaaggtctgcagggtgcccagatgggtcagccttggtgcttcttcccaccttcctacccctcatacaagctggaaaatctgagctcttctgagatgggctacacagccaccttgacaaggaccactccaacctttttccctaaagacatcctgacactgagacttgatgtgatgatggagactgagaacagactgcacttcactatcaaagacccagcaaacagaaggtatgaagtgcctctggagaccccccatgtgcacagcagagctccttcacctctgtactcagtggagttcagtgaggagccatttggggtgattgtgaggagacagctggatggcagggtactgctgaacaccacagtggcacccttgttctttgcagaccaattcctccagctcagtacaagcctgccttctcagtacattacaggactggcagagcacttaagcccattgatgttatccaccagctggaccagaattaccttgtggaacagggacctggcccctaccccaggagctaacctctatggcagccacccattttacctagccctggaggatgggggatcagcacatggggttttcctgctaaacagcaatgccatggatgtggtcctgcagccttctcctgccctgagctggaggtccacaggagggatccttgatgtgtacatctttctgggccctgagcctaagagtgtggtgcaacagtacttggatgtggtggggtaccctttcatgcctccctactgggggttgggcttccacttgtgcagatggggatacagctcaacagccatcaccaggcaggtggttgagaacatgactagagcccactttccactagatgtgcagtggaatgacctggactacatggatagtagaagagacttcaccttcaataaggatggcttcagagatttccctgccatggtgcaggaactgcaccagggaggcagaagatacatgatgatagtggaccctgctatcagcagctctggccctgcaggtagctacagaccttatgatgagggcctgaggaggggagtgttcatcaccaatgagacaggccagcccctcattggcaaggtctggccaggcagcacagctttccctgacttcaccaaccccacagccctggcctggtgggaggacatggtggctgagttccatgaccaggtaccctttgatgggatgtggattgacatgaatgaaccctctaacttcatcaggggttctgaagatggctgccctaacaatgagctggagaaccccccttatgtgccaggagttgtgggaggcacccttcaggctgccaccatctgtgccagttcccaccagttcctaagcacccactacaacctgcacaacctgtatggtctcactgaagccatagcctctcacagagctctagtgaaggccagagggaccaggccttttgttatctccaggagtacctttgctggccatggtagatatgcaggccactggacaggagatgtgtggtcctcctgggagcaattagccagcagtgtgccagagatcctgcagttcaacctgctgggggttcctttagttggggcagatgtgtgtggcttcttgggcaacacatctgaagagctgtgtgtgagatggacccagctgggagccttctacccattcatgagaaaccataactcactgctgagcctccctcaggagccctacagcttctcagaacctgcccagcaggctatgaggaaggccctgacactcaggtatgccctgttacctcacctgtacaccctgttccaccaggctcatgtagctggggagactgtggccagaccccttttccttgagtttcctaaggacagctccacctggactgtggaccaccagttgctgtggggagaggccctgctgatcacccctgttctgcaggctggcaaagctgaggtgacaggctacttccccctgggaacctggtatgacctacaaactgtgccagtggaagcactgggctcactacctccacctccagctgcccccagagaacctgctattcactctgaagggcagtgggtgacactgcctgccccattagacaccatcaatgtacacttaagggctggctacatcattccactgcaggggccaggcctgaccaccactgagtccaggcagcagcccatggccctggcagtagccctaaccaagggaggtgaggccagaggagagctgttttgggatgatggtgaaagcctagaggtactagagagaggagcctacacccaggtcatcttcctggccagaaacaacacaatagtgaatgagctggtcagggtcacatctgagggggcaggcctgcagcttcagaaggtcactgtgttgggggtagccacagctccacagcaggtactttccaatggagtgccagtcagcaacttcacctacagtcctgacacaaaggttctggacatctgtgtgagcctgctgatgggagagcagttcttggtcagctggtgc

SEQ ID NO: 659 - DNA, 3417 bp, synthetic construct
  source 1..3417: mol_type = other DNA
gacatccagatgacccagtctccatcttccgtgtctgcatctgtaggagacagagtcaccatcacttgtcgggcgagtcagggtattgccagctggttagcctggtatcagcagaaaccagggaaagcccctgagctcctgatctatgctgcatccagtttgcaaggtggggtcccatcaaggttcagcggcagtggatctgggacagatttcactctcaccatcagcagcctgcagcctgaagattttgcaatttactattgtcaacaggctaactatttcccgtggacgttcggccaagggaccaaggtggaaatcaaaggcggcggcggaagcggagggggaggatcaggaggaggcggatcccagatcaccttgaaggagtctggtcctacgctggtgaaacccacacagaccctcacgctgacctgcaccttctctgggttctcactcagcactagtggagtgggtgtggtctggatccgtcagccccccggaaaggccctggagtggcttgcactcatttattggaatgatcataagcggtacagcccatctctggggagcaggctcaccatcaccaaggacacctccaaaaaccaggtggtccttacaatgaccaacatggaccctgtggacacagccacatattactgtgcacactacagtgggagctattcctactactactatggtttggacgtctggggccaagggaccacggtcaccgtctcctcaggaggtggtggaagtggaggtggtggaagtgcacaccccggccgtcccagagcagtgcccacacagtgcgacgtcccccccaacagccgcttcgattgcgcccctgacaaggccatcacccaggaacagtgcgaggcccgcggctgttgctacatccctgcaaagcaggggctgcagggagcccagatggggcagccctggtgcttcttcccacccagctaccccagctacaagctggagaacctgagctcctctgaaatgggctacacggccaccctgacccgtaccacccccaccttcttccccaaggacatcctgaccctgcggctggacgtgatgatggagactgagaaccgcctccacttcacgatcaaagatccagctaacaggcgctacgaggtgcccttggagaccccgcatgtccacagccgggcaccgtccccactctacagcgtggagttctccgaggagcccttcggggtgatcgtgcgccggcagctggacggccgcgtgctgctgaacacgacggtggcgcccctgttctttgcggaccagttccttcagctgtccacctcgctgccctcgcagtatatcacaggcctcgccgagcacctcagtcccctgatgctcagcaccagctggaccaggatcaccctgtggaaccgggaccttgcgcccacgcccggtgcgaacctctacgggtctcaccctttctacctggcgctggaggacggcgggtcggcacacggggtgttcctgctaaacagcaatgccatggatgtggtcctgcagccgagccctgcccttagctggaggtcgacaggtgggatcctggatgtctacatcttcctgggcccagagcccaagagcgtggtgcagcagtacctggacgttgtgggatacccgttcatgccgccatactggggcctgggcttccacctgtgccgctggggctactcctccaccgctatcacccgccaggtggtggagaacatgaccagggcccacttccccctggacgtccagtggaacgacctggactacatggactcccggagggacttcacgttcaacaaggatggcttccgggacttcccggccatggtgcaggagctgcaccagggcggccggcgctacatgatgatcgtggatcctgccatcagcagctcgggccctgccgggagctacaggccctacgacgagggtctgcggaggggggttttcatcaccaacgagaccggccagccgctgattgggaaggtatggcccgggtccactgccttccccgacttcaccaaccccacagccctggcctggtgggaggacatggtggctgagttccatgaccaggtgcccttcgacggcatgtggattgacatgaacgagccttccaacttcatcaggggctctgaggacggctgccccaacaatgagctggagaacccaccctacgtgcctggggtggttggggggaccctccaggcggccaccatctgtgcctccagccaccagtttctctccacacactacaacctgcacaacctctacggcctgaccgaagccatcgcctcccacagggcgctggtgaaggctcgggggacacgcccatttgtgatctcccgctcgacctttgctggccacggccgatacgccggccactggacgggggacgtgtggagctcctgggagcagctcgcctcctccgtgccagaaatcctgcagtttaacctgctgggggtgcctctggtcggggccgacgtctgcggcttcctgggcaacacctcagaggagctgtgtgtgcgctggacccagctgggggccttctaccccttcatgcggaaccacaacagcctgctcagtctgccccaggagccgtacagcttcagcgagccggcccagcaggccatgaggaaggccctcaccctgcgctacgcactcctcccccacctctacacactgttccaccaggcccacgtcgcgggggagaccgtggcccggcccctcttcctggagttccccaaggactctagcacctggactgtggaccaccagctcctgtggggggaggccctgctcatcaccccagtgctccaggccgggaaggccgaagtgactggctacttccccttgggcacatggtacgacctgcagacggtgccagtagaggcccttggcagcctcccacccccacctgcagctccccgtgagccagccatccacagcgaggggcagtgggtgacgctgccggcccccctggacaccatcaacgtccacctccgggctgggtacatcatccccctgcagggccctggcctcacaaccacagagtcccgccagcagcccatggccctggctgtggccctgaccaagggtggggaggcccgaggggagctgttctgggacgatggagagagcctggaagtgctggagcgaggggcctacacacaggtcatcttcctggccaggaataacacgatcgtgaatgagctggtacgtgtgaccagtgagggagctggcctgcagctgcagaaggtgactgtcctgggcgtggccacggcgccccagcaggtcctctccaacggtgtccctgtctccaacttcacctacagccccgacaccaaggtcctggacatctgtgtctcgctgttgatgggagagcagtttctcgtcagctggtgt

SEQ ID NO: 660 - DNA, 3426 bp, synthetic construct
  source 1..3426: mol_type = other DNA
gacatccagatgacccagtctccatcctccctgtctgcatctgtaggagacagagtcaccatcacttgccgggcaagtcagagcattagcagctatttaaattggtatcagcagaaaccagggaaagcccctaagctcctgatctatgctgcatccagtttgcaaagtggggtcccgtcaaggttcagtggcagtggatctgggacagatttcactctcaccatcagcagtctgcaacctgaagattttgcaacttactactgtcaacagagttacagtacccctccgatcaccttcggccaagggacacgactggagattaaaggcggcggcggaagcggagggggaggatcaggaggaggcggatcccaggtgcagctggtggagtctgggggaggcgtggtccagcctggaaggtccctgagactctcctgcgcagcctctggattcccctttagtaattatgtcatgtattgggtccgccaggctccaggcaaggggctggagtgggtggctcttattttttttgacggaaagaaaaactatcatgcagactccgtgaagggccgattcaccataaccagagacaattccaaaaatatgttatatctgcaaatgaacagcctgagacctgaggacgcggctgtgtattactgtgcgaaaatccattgtcctaatggtgtatgttacaaggggtattacggaatggacgtctggggccaagggaccacggtcaccgtctcctcaggaggtggtggaagtggaggtggtggaagtgcacaccccggccgtcccagagcagtgcccacacagtgcgacgtcccccccaacagccgcttcgattgcgcccctgacaaggccatcacccaggaacagtgcgaggcccgcggctgttgctacatccctgcaaagcaggggctgcagggagcccagatggggcagccctggtgcttcttcccacccagctaccccagctacaagctggagaacctgagctcctctgaaatgggctacacggccaccctgacccgtaccacccccaccttcttccccaaggacatcctgaccctgcggctggacgtgatgatggagactgagaaccgcctccacttcacgatcaaagatccagctaacaggcgctacgaggtgcccttggagaccccgcatgtccacagccgggcaccgtccccactctacagcgtggagttctccgaggagcccttcggggtgatcgtgcgccggcagctggacggccgcgtgctgctgaacacgacggtggcgcccctgttctttgcggaccagttccttcagctgtccacctcgctgccctcgcagtatatcacaggcctcgccgagcacctcagtcccctgatgctcagcaccagctggaccaggatcaccctgtggaaccgggaccttgcgcccacgcccggtgcgaacctctacgggtctcaccctttctacctggcgctggaggacggcgggtcggcacacggggtgttcctgctaaacagcaatgccatggatgtggtcctgcagccgagccctgcccttagctggaggtcgacaggtgggatcctggatgtctacatcttcctgggcccagagcccaagagcgtggtgcagcagtacctggacgttgtgggatacccgttcatgccgccatactggggcctgggcttccacctgtgccgctggggctactcctccaccgctatcacccgccaggtggtggagaacatgaccagggcccacttccccctggacgtccagtggaacgacctggactacatggactcccggagggacttcacgttcaacaaggatggcttccgggacttcccggccatggtgcaggagctgcaccagggcggccggcgctacatgatgatcgtggatcctgccatcagcagctcgggccctgccgggagctacaggccctacgacgagggtctgcggaggggggttttcatcaccaacgagaccggccagccgctgattgggaaggtatggcccgggtccactgccttccccgacttcaccaaccccacagccctggcctggtgggaggacatggtggctgagttccatgaccaggtgcccttcgacggcatgtggattgacatgaacgagccttccaacttcatcaggggctctgaggacggctgccccaacaatgagctggagaacccaccctacgtgcctggggtggttggggggaccctccaggcggccaccatctgtgcctccagccaccagtttctctccacacactacaacctgcacaacctctacggcctgaccgaagccatcgcctcccacagggcgctggtgaaggctcgggggacacgcccatttgtgatctcccgctcgacctttgctggccacggccgatacgccggccactggacgggggacgtgtggagctcctgggagcagctcgcctcctccgtgccagaaatcctgcagtttaacctgctgggggtgcctctggtcggggccgacgtctgcggcttcctgggcaacacctcagaggagctgtgtgtgcgctggacccagctgggggccttctaccccttcatgcggaaccacaacagcctgctcagtctgccccaggagccgtacagcttcagcgagccggcccagcaggccatgaggaaggccctcaccctgcgctacgcactcctcccccacctctacacactgttccaccaggcccacgtcgcgggggagaccgtggcccggcccctcttcctggagttccccaaggactctagcacctggactgtggaccaccagctcctgtggggggaggccctgctcatcaccccagtgctccaggccgggaaggccgaagtgactggctacttccccttgggcacatggtacgacctgcagacggtgccagtagaggcccttggcagcctcccacccccacctgcagctccccgtgagccagccatccacagcgaggggcagtgggtgacgctgccggcccccctggacaccatcaacgtccacctccgggctgggtacatcatccccctgcagggccctggcctcacaaccacagagtcccgccagcagcccatggccctggctgtggccctgaccaagggtggggaggcccgaggggagctgttctgggacgatggagagagcctggaagtgctggagcgaggggcctacacacaggtcatcttcctggccaggaataacacgatcgtgaatgagctggtacgtgtgaccagtgagggagctggcctgcagctgcagaaggtgactgtcctgggcgtggccacggcgccccagcaggtcctctccaacggtgtccctgtctccaacttcacctacagccccgacaccaaggtcctggacatctgtgtctcgctgttgatgggagagcagtttctcgtcagctggtgt

SEQ ID NO: 661 - DNA, 3405 bp, synthetic construct
  source 1..3405: mol_type = other DNA
gacatccagatgacccagtctccatcctccctgtctgcatctgtaggagacagagtcaccatcacttgccgggcaagtcagagcattagcagctatttaaattggtatcagcagaaaccagggaaagcccctaagctcctgatctatgctgcatccagtttgcaaagtggggtcccgtcaaggttcagtggcagtggatctgggacagatttcactctcaccatcagcagtctgcaacctgaagattttgcaacttactactgtcaacagagttacagtacccctccgatcaccttcggccaagggacacgactggagattaaaggcggcggcggaagcggagggggaggatcaggaggaggcggatccgaggtgcagctggtggagtctgggggaggcttagtacagcctggagggtccctaagactctcctgtgcagcctctggattcaccttcaatatttttgaaatgaactgggtccgccaggctccagggaaggggctggagtggatttcctacattagtagtcgtggaactaccacatactacgcagactctgtgaggggccgattcaccatctccagagacaacgccaagaactcactgtatctgcaaatgaacagcctgagagccgaggacacggctgtttattactgtgcgagagattatgaagcaacaatcccttttgacttctggggccagggaaccctggtcaccgtctcctcaggaggtggtggaagtggaggtggtggaagtgcacaccccggccgtcccagagcagtgcccacacagtgcgacgtcccccccaacagccgcttcgattgcgcccctgacaaggccatcacccaggaacagtgcgaggcccgcggctgttgctacatccctgcaaagcaggggctgcagggagcccagatggggcagccctggtgcttcttcccacccagctaccccagctacaagctggagaacctgagctcctctgaaatgggctacacggccaccctgacccgtaccacccccaccttcttccccaaggacatcctgaccctgcggctggacgtgatgatggagactgagaaccgcctccacttcacgatcaaagatccagctaacaggcgctacgaggtgcccttggagaccccgcatgtccacagccgggcaccgtccccactctacagcgtggagttctccgaggagcccttcggggtgatcgtgcgccggcagctggacggccgcgtgctgctgaacacgacggtggcgcccctgttctttgcggaccagttccttcagctgtccacctcgctgccctcgcagtatatcacaggcctcgccgagcacctcagtcccctgatgctcagcaccagctggaccaggatcaccctgtggaaccgggaccttgcgcccacgcccggtgcgaacctctacgggtctcaccctttctacctggcgctggaggacggcgggtcggcacacggggtgttcctgctaaacagcaatgccatggatgtggtcctgcagccgagccctgcccttagctggaggtcgacaggtgggatcctggatgtctacatcttcctgggcccagagcccaagagcgtggtgcagcagtacctggacgttgtgggatacccgttcatgccgccatactggggcctgggcttccacctgtgccgctggggctactcctccaccgctatcacccgccaggtggtggagaacatgaccagggcccacttccccctggacgtccagtggaacgacctggactacatggactcccggagggacttcacgttcaacaaggatggcttccgggacttcccggccatggtgcaggagctgcaccagggcggccggcgctacatgatgatcgtggatcctgccatcagcagctcgggccctgccgggagctacaggccctacgacgagggtctgcggaggggggttttcatcaccaacgagaccggccagccgctgattgggaaggtatggcccgggtccactgccttccccgacttcaccaaccccacagccctggcctggtgggaggacatggtggctgagttccatgaccaggtgcccttcgacggcatgtggattgacatgaacgagccttccaacttcatcaggggctctgaggacggctgccccaacaatgagctggagaacccaccctacgtgcctggggtggttggggggaccctccaggcggccaccatctgtgcctccagccaccagtttctctccacacactacaacctgcacaacctctacggcctgaccgaagccatcgcctcccacagggcgctggtgaaggctcgggggacacgcccatttgtgatctcccgctcgacctttgctggccacggccgatacgccggccactggacgggggacgtgtggagctcctgggagcagctcgcctcctccgtgccagaaatcctgcagtttaacctgctgggggtgcctctggtcggggccgacgtctgcggcttcctgggcaacacctcagaggagctgtgtgtgcgctggacccagctgggggccttctaccccttcatgcggaaccacaacagcctgctcagtctgccccaggagccgtacagcttcagcgagccggcccagcaggccatgaggaaggccctcaccctgcgctacgcactcctcccccacctctacacactgttccaccaggcccacgtcgcgggggagaccgtggcccggcccctcttcctggagttccccaaggactctagcacctggactgtggaccaccagctcctgtggggggaggccctgctcatcaccccagtgctccaggccgggaaggccgaagtgactggctacttccccttgggcacatggtacgacctgcagacggtgccagtagaggcccttggcagcctcccacccccacctgcagctccccgtgagccagccatccacagcgaggggcagtgggtgacgctgccggcccccctggacaccatcaacgtccacctccgggctgggtacatcatccccctgcagggccctggcctcacaaccacagagtcccgccagcagcccatggccctggctgtggccctgaccaagggtggggaggcccgaggggagctgttctgggacgatggagagagcctggaagtgctggagcgaggggcctacacacaggtcatcttcctggccaggaataacacgatcgtgaatgagctggtacgtgtgaccagtgagggagctggcctgcagctgcagaaggtgactgtcctgggcgtggccacggcgccccagcaggtcctctccaacggtgtccctgtctccaacttcacctacagccccgacaccaaggtcctggacatctgtgtctcgctgttgatgggagagcagtttctcgtcagctggtgt

SEQ ID NO: 662 - DNA, 3411 bp, synthetic construct
  source 1..3411: mol_type = other DNA
gacatccagatgacccagtctccatcctccctgtctgcatctgtaggagacagagtcaccatcacttgccgggcaagtcagagcattagcagctatttaaattggtatcagcagaaaccagggaaagcccctaagctcctgatctatgctgcatccagtttgcaaagtggggtcccgtcaaggttcagtggcagtggatctgggacagatttcactctcaccatcagcagtctgcaacctgaagattttgcaacttactactgtcaacagagttacagtacccctccgatcaccttcggccaagggacacgactggagattaaaggcggcggcggaagcggagggggaggatcaggaggaggcggatccgaagtgcagctggtggagtctgggggaggcttggttcagcctggcaggtccctgagactctcctgtgcagcctctggattcacctttgatgattatgccatgaactgggtccggcaagctccagggaagggcctggagtgggtctcaggtattagttggagtagtggtagcatggactatgcggactctgtgaagggccgattcaccatctccagagacaacgccaaaaactccctgtatctgcaaatgaacagtctgagaactgaggacacggccttatattactgtgcaaaagctagggaagttggagactactacggtatggacgtctggggccaagggaccacggtcaccgtctcctcaggaggtggtggaagtggaggtggtggaagtgcacaccccggccgtcccagagcagtgcccacacagtgcgacgtcccccccaacagccgcttcgattgcgcccctgacaaggccatcacccaggaacagtgcgaggcccgcggctgttgctacatccctgcaaagcaggggctgcagggagcccagatggggcagccctggtgcttcttcccacccagctaccccagctacaagctggagaacctgagctcctctgaaatgggctacacggccaccctgacccgtaccacccccaccttcttccccaaggacatcctgaccctgcggctggacgtgatgatggagactgagaaccgcctccacttcacgatcaaagatccagctaacaggcgctacgaggtgcccttggagaccccgcatgtccacagccgggcaccgtccccactctacagcgtggagttctccgaggagcccttcggggtgatcgtgcgccggcagctggacggccgcgtgctgctgaacacgacggtggcgcccctgttctttgcggaccagttccttcagctgtccacctcgctgccctcgcagtatatcacaggcctcgccgagcacctcagtcccctgatgctcagcaccagctggaccaggatcaccctgtggaaccgggaccttgcgcccacgcccggtgcgaacctctacgggtctcaccctttctacctggcgctggaggacggcgggtcggcacacggggtgttcctgctaaacagcaatgccatggatgtggtcctgcagccgagccctgcccttagctggaggtcgacaggtgggatcctggatgtctacatcttcctgggcccagagcccaagagcgtggtgcagcagtacctggacgttgtgggatacccgttcatgccgccatactggggcctgggcttccacctgtgccgctggggctactcctccaccgctatcacccgccaggtggtggagaacatgaccagggcccacttccccctggacgtccagtggaacgacctggactacatggactcccggagggacttcacgttcaacaaggatggcttccgggacttcccggccatggtgcaggagctgcaccagggcggccggcgctacatgatgatcgtggatcctgccatcagcagctcgggccctgccgggagctacaggccctacgacgagggtctgcggaggggggttttcatcaccaacgagaccggccagccgctgattgggaaggtatggcccgggtccactgccttccccgacttcaccaaccccacagccctggcctggtgggaggacatggtggctgagttccatgaccaggtgcccttcgacggcatgtggattgacatgaacgagccttccaacttcatcaggggctctgaggacggctgccccaacaatgagctggagaacccaccctacgtgcctggggtggttggggggaccctccaggcggccaccatctgtgcctccagccaccagtttctctccacacactacaacctgcacaacctctacggcctgaccgaagccatcgcctcccacagggcgctggtgaaggctcgggggacacgcccatttgtgatctcccgctcgacctttgctggccacggccgatacgccggccactggacgggggacgtgtggagctcctgggagcagctcgcctcctccgtgccagaaatcctgcagtttaacctgctgggggtgcctctggtcggggccgacgtctgcggcttcctgggcaacacctcagaggagctgtgtgtgcgctggacccagctgggggccttctaccccttcatgcggaaccacaacagcctgctcagtctgccccaggagccgtacagcttcagcgagccggcccagcaggccatgaggaaggccctcaccctgcgctacgcactcctcccccacctctacacactgttccaccaggcccacgtcgcgggggagaccgtggcccggcccctcttcctggagttccccaaggactctagcacctggactgtggaccaccagctcctgtggggggaggccctgctcatcaccccagtgctccaggccgggaaggccgaagtgactggctacttccccttgggcacatggtacgacctgcagacggtgccagtagaggcccttggcagcctcccacccccacctgcagctccccgtgagccagccatccacagcgaggggcagtgggtgacgctgccggcccccctggacaccatcaacgtccacctccgggctgggtacatcatccccctgcagggccctggcctcacaaccacagagtcccgccagcagcccatggccctggctgtggccctgaccaagggtggggaggcccgaggggagctgttctgggacgatggagagagcctggaagtgctggagcgaggggcctacacacaggtcatcttcctggccaggaataacacgatcgtgaatgagctggtacgtgtgaccagtgagggagctggcctgcagctgcagaaggtgactgtcctgggcgtggccacggcgccccagcaggtcctctccaacggtgtccctgtctccaacttcacctacagccccgacaccaaggtcctggacatctgtgtctcgctgttgatgggagagcagtttctcgtcagctggtgt

SEQ ID NO: 663 - DNA, 3417 bp, synthetic construct
  source 1..3417: mol_type = other DNA
gacatccagatgacacagagcccatcctctgtgtctgcctctgtgggagacagagtgaccatcacctgtagagccagccagggcattgcttcttggctggcctggtatcagcagaagcctggaaaggcccctgagctgctgatctatgctgccagctctctgcaaggtggtgtccccagcagattcagtggcagtggctctggcacagacttcaccctgaccataagcagcctgcagcctgaggactttgccatctactactgccagcaggccaactacttcccctggacatttggccagggcaccaaggtggaaatcaaaggtggtggtggaagtggtggtggtggcagtggtggtggtggaagccagatcaccctgaaagagtctggccccacactggtcaagcccacacagaccctgacactgacctgcaccttctctggcttcagcctgagcaccagtggtgttggagttgtgtggatcagacagcctcctggcaaggccctggaatggctggcactgatctactggaatgaccacaagagatacagccccagcctgggcagcagactgacaatcaccaaggacaccagcaagaaccaggtggtgctgaccatgaccaacatggaccctgtggacacagccacctactattgtgcccactactctggcagctacagctactactactatggcctggatgtgtggggacagggcacaacagtgacagtgtccagtggtggtggtggcagtggtggtggaggatctgcccatcctggcagacctagagctgtgcccacacagtgtgatgtgcctccaaacagcagatttgactgtgcccctgacaaggccatcacacaagagcagtgtgaagccagaggctgctgttacatccctgccaagcaaggactgcaaggggctcagatgggacagccctggtgcttcttcccaccatcttaccccagctacaagctggaaaacctgagcagctctgagatgggctacactgctacactgaccagaaccacacctacattcttcccaaaggacatcctgacactgaggctggatgtgatgatggaaacagagaacaggctgcacttcaccatcaaggaccctgccaatagaagatatgaggtgcccctggaaacccctcatgtgcactctagagccccatctccactgtactctgtggaattttctgaggaaccctttggggtcatagtcagaaggcagctggatggcagagtgctgctgaacacaactgtggcccctctgttctttgctgatcagttcctgcagctgagcaccagcctgcctagccagtatatcacaggcctggcagagcacctgtctccactgatgctgagcacatcctggaccagaatcaccctgtggaacagagacctggctcccacacctggggccaacctgtatggctctcaccccttctatctggccctggaagatggtggttcagcccatggtgtctttctgctgaactccaatgccatggatgtggtgctgcagccctctcctgctctgtcttggagaagcactggtggcatcctggatgtgtacatctttctgggccctgagcctaagtctgtggtgcagcagtacctggatgttgtgggctaccccttcatgcctccttattggggcctgggcttccacctgtgcagatggggatacagcagcacagccatcaccagacaggttgtggaaaacatgaccagagcacacttcccactggatgtgcagtggaatgacctggactacatggacagcagaagggacttcaccttcaacaaggatggcttcagagacttccctgccatggtgcaagagctgcaccaaggtggtagaagatatatgatgattgtggacccagccatcagctcctctggaccagctggcagctacagaccctatgatgagggactgagaagaggggtgttcatcaccaatgagacaggccagcctctgattggcaaagtgtggccaggctccacagcctttccagatttcacaaaccccacagctctggcttggtgggaagatatggtggcagagttccatgatcaggtgccctttgatggcatgtggattgacatgaatgagcccagcaacttcatcaggggctctgaggatggatgccccaacaatgaactggaaaatcctccttatgtgcctggtgttgttggagggacactgcaggcagccacaatttgtgccagctctcaccagtttctgagcacccactacaacctgcacaatctgtatggcctgactgaggccattgccagccacagggctcttgtgaaggctagaggcaccagaccttttgtgatcagcaggtccacctttgctggccatggcagatatgctggccactggactggggatgtgtggtctagttgggagcagctggctagctctgtgcctgagatcctgcagttcaacctgctgggagtgccccttgttggagcagatgtgtgtggcttcctgggcaacacctcagaggaactgtgtgtcagatggactcagctgggagcattctaccctttcatgagaaaccacaacagcctgctgagcctgcctcaagagccttacagcttttctgagccagcacagcaggccatgagaaaggccctgactctgagatatgccctgctgcctcacctgtacaccctgttccatcaggctcatgtggctggggagactgtggctagacccctgttcctggaattccccaaggacagctccacctggacagtggatcatcagctgctgtggggagaagccctgctgattacacctgtgctgcaggctggcaaggctgaagtgacaggctacttccctcttggcacttggtatgacctgcagacagtgcctgtggaagctctgggatctctgcctccacctcctgctgctcctagagagcctgccattcactctgaaggccagtgggttaccctgcctgctccactggataccatcaatgtgcatctgagagcaggctacatcatccctctgcaaggccctggcctgaccaccacagaatctagacagcagccaatggcactggctgtggccctgaccaaaggtggagaagctagaggggagctgttctgggatgatggggagagcctggaagtgctggaaagaggggcctatacacaagtgatttttctggctaggaacaataccattgtgaatgagcttgtcagagtcacctctgaaggtgctggcctgcagctccagaaagtgacagtgcttggagtggccacagcaccccagcaagtgctgtctaatggggtgccagtgtccaacttcacatacagccctgataccaaggtcctggacatctgtgtgtccctgcttatgggagagcagttcctggtgtcttggtgc

SEQ ID NO: 664 - DNA, 3417 bp, synthetic construct
  source 1..3417: mol_type = other DNA
gacatccagatgacccagagcccaagctctgtgtctgcctcagtgggagacagagtgacaatcacctgcagagccagccagggcattgccagctggctggcctggtaccagcagaagcctggcaaagctcctgaactcctgatctatgctgccagcagcctgcagggtggggtgcctagcaggttctctggctcaggctctggcacagacttcaccctgacaatcagcagcctgcagcctgaggactttgctatctactactgccagcaggccaactacttcccctggacctttggccaaggcaccaaggtggagatcaagggaggaggaggctctggtggaggtggctctgggggagggggcagccagatcaccctgaaggagagtggccctacactggttaagcccacccagacactgacactgacctgcaccttctctggcttcagcctgagcaccagtggagtgggagtggtgtggatcagacagccccctggcaaggccctggaatggctggccctgatctactggaatgatcacaagagatacagccctagcctgggctccagactgaccatcaccaaggacaccagcaaaaaccaggtggtgctgaccatgaccaacatggatccagtggacacagccacctactactgtgcccactactctggcagctacagctactactactatggcctggatgtctggggccaaggcaccacagtcacagtgtccagtgggggtggaggctctggaggaggaggcagtgcccatcctggcagacctagagctgtgcccacacagtgtgatgtgcctccaaacagcagatttgactgtgcccctgacaaggccatcacacaagagcagtgtgaagccagaggctgctgttacatccctgccaagcaaggactgcaaggggctcagatgggacagccctggtgcttcttcccaccatcttaccccagctacaagctggaaaacctgagcagctctgagatgggctacactgctacactgaccagaaccacacctacattcttcccaaaggacatcctgacactgaggctggatgtgatgatggaaacagagaacaggctgcacttcaccatcaaggaccctgccaatagaagatatgaggtgcccctggaaacccctcatgtgcactctagagccccatctccactgtactctgtggaattttctgaggaaccctttggggtcatagtcagaaggcagctggatggcagagtgctgctgaacacaactgtggcccctctgttctttgctgatcagttcctgcagctgagcaccagcctgcctagccagtatatcacaggcctggcagagcacctgtctccactgatgctgagcacatcctggaccagaatcaccctgtggaacagagacctggctcccacacctggggccaacctgtatggctctcaccccttctatctggccctggaagatggtggttcagcccatggtgtctttctgctgaactccaatgccatggatgtggtgctgcagccctctcctgctctgtcttggagaagcactggtggcatcctggatgtgtacatctttctgggccctgagcctaagtctgtggtgcagcagtacctggatgttgtgggctaccccttcatgcctccttattggggcctgggcttccacctgtgcagatggggatacagcagcacagccatcaccagacaggttgtggaaaacatgaccagagcacacttcccactggatgtgcagtggaatgacctggactacatggacagcagaagggacttcaccttcaacaaggatggcttcagagacttccctgccatggtgcaagagctgcaccaaggtggtagaagatatatgatgattgtggacccagccatcagctcctctggaccagctggcagctacagaccctatgatgagggactgagaagaggggtgttcatcaccaatgagacaggccagcctctgattggcaaagtgtggccaggctccacagcctttccagatttcacaaaccccacagctctggcttggtgggaagatatggtggcagagttccatgatcaggtgccctttgatggcatgtggattgacatgaatgagcccagcaacttcatcaggggctctgaggatggatgccccaacaatgaactggaaaatcctccttatgtgcctggtgttgttggagggacactgcaggcagccacaatttgtgccagctctcaccagtttctgagcacccactacaacctgcacaatctgtatggcctgactgaggccattgccagccacagggctcttgtgaaggctagaggcaccagaccttttgtgatcagcaggtccacctttgctggccatggcagatatgctggccactggactggggatgtgtggtctagttgggagcagctggctagctctgtgcctgagatcctgcagttcaacctgctgggagtgccccttgttggagcagatgtgtgtggcttcctgggcaacacctcagaggaactgtgtgtcagatggactcagctgggagcattctaccctttcatgagaaaccacaacagcctgctgagcctgcctcaagagccttacagcttttctgagccagcacagcaggccatgagaaaggccctgactctgagatatgccctgctgcctcacctgtacaccctgttccatcaggctcatgtggctggggagactgtggctagacccctgttcctggaattccccaaggacagctccacctggacagtggatcatcagctgctgtggggagaagccctgctgattacacctgtgctgcaggctggcaaggctgaagtgacaggctacttccctcttggcacttggtatgacctgcagacagtgcctgtggaagctctgggatctctgcctccacctcctgctgctcctagagagcctgccattcactctgaaggccagtgggttaccctgcctgctccactggataccatcaatgtgcatctgagagcaggctacatcatccctctgcaaggccctggcctgaccaccacagaatctagacagcagccaatggcactggctgtggccctgaccaaaggtggagaagctagaggggagctgttctgggatgatggggagagcctggaagtgctggaaagaggggcctatacacaagtgatttttctggctaggaacaataccattgtgaatgagcttgtcagagtcacctctgaaggtgctggcctgcagctccagaaagtgacagtgcttggagtggccacagcaccccagcaagtgctgtctaatggggtgccagtgtccaacttcacatacagccctgataccaaggtcctggacatctgtgtgtccctgcttatgggagagcagttcctggtgtcttggtgc

SEQ ID NO: 665 - DNA, 3417 bp, synthetic construct
  source 1..3417: mol_type = other DNA
gatatccagatgacacaaagcccttcctctgtgtctgcttcagtgggagacagagtcacaatcacatgcagagccagccagggcattgccagctggctggcctggtaccagcagaagcctggcaaagccccagaactgctgatctatgctgccagcagcctccagggtggggtgcccagcagattctctggctctggctctggcacagacttcaccctgaccatcagcagcctgcagccagaggactttgccatctactactgccagcaggccaactacttcccctggacctttggccagggcaccaaggtggaaatcaaggggggaggaggctctggaggaggaggcagtggtggaggaggcagccagatcaccctgaaggagtctggccctaccctggtgaagcctacccagaccctgaccctgacctgcaccttctctggcttcagcctgagcacaagtggtgtgggagtggtgtggatcagacaaccccctggcaaggctctggagtggctggccctgatctactggaatgaccacaagagatacagccctagcctgggcagcaggctgaccatcaccaaagataccagcaagaaccaggtggtgctgaccatgaccaacatggaccctgttgacacagccacatactactgtgcccactacagtggcagctacagctactactactatggcctggatgtctggggccagggcaccacagtgacagtgtcctcagggggtggaggctctgggggaggaggcagtgcccatcctggcagacctagagctgtgcccacacagtgtgatgtgcctccaaacagcagatttgactgtgcccctgacaaggccatcacacaagagcagtgtgaagccagaggctgctgttacatccctgccaagcaaggactgcaaggggctcagatgggacagccctggtgcttcttcccaccatcttaccccagctacaagctggaaaacctgagcagctctgagatgggctacactgctacactgaccagaaccacacctacattcttcccaaaggacatcctgacactgaggctggatgtgatgatggaaacagagaacaggctgcacttcaccatcaaggaccctgccaatagaagatatgaggtgcccctggaaacccctcatgtgcactctagagccccatctccactgtactctgtggaattttctgaggaaccctttggggtcatagtcagaaggcagctggatggcagagtgctgctgaacacaactgtggcccctctgttctttgctgatcagttcctgcagctgagcaccagcctgcctagccagtatatcacaggcctggcagagcacctgtctccactgatgctgagcacatcctggaccagaatcaccctgtggaacagagacctggctcccacacctggggccaacctgtatggctctcaccccttctatctggccctggaagatggtggttcagcccatggtgtctttctgctgaactccaatgccatggatgtggtgctgcagccctctcctgctctgtcttggagaagcactggtggcatcctggatgtgtacatctttctgggccctgagcctaagtctgtggtgcagcagtacctggatgttgtgggctaccccttcatgcctccttattggggcctgggcttccacctgtgcagatggggatacagcagcacagccatcaccagacaggttgtggaaaacatgaccagagcacacttcccactggatgtgcagtggaatgacctggactacatggacagcagaagggacttcaccttcaacaaggatggcttcagagacttccctgccatggtgcaagagctgcaccaaggtggtagaagatatatgatgattgtggacccagccatcagctcctctggaccagctggcagctacagaccctatgatgagggactgagaagaggggtgttcatcaccaatgagacaggccagcctctgattggcaaagtgtggccaggctccacagcctttccagatttcacaaaccccacagctctggcttggtgggaagatatggtggcagagttccatgatcaggtgccctttgatggcatgtggattgacatgaatgagcccagcaacttcatcaggggctctgaggatggatgccccaacaatgaactggaaaatcctccttatgtgcctggtgttgttggagggacactgcaggcagccacaatttgtgccagctctcaccagtttctgagcacccactacaacctgcacaatctgtatggcctgactgaggccattgccagccacagggctcttgtgaaggctagaggcaccagaccttttgtgatcagcaggtccacctttgctggccatggcagatatgctggccactggactggggatgtgtggtctagttgggagcagctggctagctctgtgcctgagatcctgcagttcaacctgctgggagtgccccttgttggagcagatgtgtgtggcttcctgggcaacacctcagaggaactgtgtgtcagatggactcagctgggagcattctaccctttcatgagaaaccacaacagcctgctgagcctgcctcaagagccttacagcttttctgagccagcacagcaggccatgagaaaggccctgactctgagatatgccctgctgcctcacctgtacaccctgttccatcaggctcatgtggctggggagactgtggctagacccctgttcctggaattccccaaggacagctccacctggacagtggatcatcagctgctgtggggagaagccctgctgattacacctgtgctgcaggctggcaaggctgaagtgacaggctacttccctcttggcacttggtatgacctgcagacagtgcctgtggaagctctgggatctctgcctccacctcctgctgctcctagagagcctgccattcactctgaaggccagtgggttaccctgcctgctccactggataccatcaatgtgcatctgagagcaggctacatcatccctctgcaaggccctggcctgaccaccacagaatctagacagcagccaatggcactggctgtggccctgaccaaaggtggagaagctagaggggagctgttctgggatgatggggagagcctggaagtgctggaaagaggggcctatacacaagtgatttttctggctaggaacaataccattgtgaatgagcttgtcagagtcacctctgaaggtgctggcctgcagctccagaaagtgacagtgcttggagtggccacagcaccccagcaagtgctgtctaatggggtgccagtgtccaacttcacatacagccctgataccaaggtcctggacatctgtgtgtccctgcttatgggagagcagttcctggtgtcttggtgc

SEQ ID NO: 666 - DNA, 3405 bp, synthetic construct
  source 1..3405: mol_type = other DNA
gacatccagatgacacagagcccctctagcctgtctgcctctgtgggagacagagtgaccatcacctgtagagccagccagagcatcagcagctacctgaactggtatcagcagaagcctggcaaggcccctaaactgctgatctatgctgccagcagcctgcagtctggggtgccctctagattttctggcagtggctctggcacagacttcaccctgaccataagctccctgcagcctgaggactttgccacctactactgtcagcagagctacagcacccctcctatcacctttggccagggcaccagactggaaatcaaaggtggtggtggaagtggtggtggtggcagtggtggtggtggatctgaagtgcagctggtggaaagtggtggtggcctggttcagcctggtggctctctgagactgagctgtgcagcctctggcttcaccttcaacatctttgagatgaactgggtcagacaggccccaggcaaaggcctggaatggatcagctacatcagctccagaggcaccacaacctactatgctgactctgtcagaggcaggttcaccatcagcagagacaatgccaagaacagcctgtacctgcagatgaactccctgagagctgaggacacagcagtgtactactgtgccagggactatgaggctacaatcccctttgacttctggggccagggaaccctggtcacagttagcagtggtggtggtggtagtggtggtggtggctctgcccatcctggcagacctagagctgtgcccacacagtgtgatgtgcctccaaacagcagatttgactgtgcccctgacaaggccatcacacaagagcagtgtgaagccagaggctgctgttacatccctgccaagcaaggactgcaaggggctcagatgggacagccctggtgcttcttcccaccatcttaccccagctacaagctggaaaacctgagcagctctgagatgggctacactgctacactgaccagaaccacacctacattcttcccaaaggacatcctgacactgaggctggatgtgatgatggaaacagagaacaggctgcacttcaccatcaaggaccctgccaatagaagatatgaggtgcccctggaaacccctcatgtgcactctagagccccatctccactgtactctgtggaattttctgaggaaccctttggggtcatagtcagaaggcagctggatggcagagtgctgctgaacacaactgtggcccctctgttctttgctgatcagttcctgcagctgagcaccagcctgcctagccagtatatcacaggcctggcagagcacctgtctccactgatgctgagcacatcctggaccagaatcaccctgtggaacagagacctggctcccacacctggggccaacctgtatggctctcaccccttctatctggccctggaagatggtggttcagcccatggtgtctttctgctgaactccaatgccatggatgtggtgctgcagccctctcctgctctgtcttggagaagcactggtggcatcctggatgtgtacatctttctgggccctgagcctaagtctgtggtgcagcagtacctggatgttgtgggctaccccttcatgcctccttattggggcctgggcttccacctgtgcagatggggatacagcagcacagccatcaccagacaggttgtggaaaacatgaccagagcacacttcccactggatgtgcagtggaatgacctggactacatggacagcagaagggacttcaccttcaacaaggatggcttcagagacttccctgccatggtgcaagagctgcaccaaggtggtagaagatatatgatgattgtggacccagccatcagctcctctggaccagctggcagctacagaccctatgatgagggactgagaagaggggtgttcatcaccaatgagacaggccagcctctgattggcaaagtgtggccaggctccacagcctttccagatttcacaaaccccacagctctggcttggtgggaagatatggtggcagagttccatgatcaggtgccctttgatggcatgtggattgacatgaatgagcccagcaacttcatcaggggctctgaggatggatgccccaacaatgaactggaaaatcctccttatgtgcctggtgttgttggagggacactgcaggcagccacaatttgtgccagctctcaccagtttctgagcacccactacaacctgcacaatctgtatggcctgactgaggccattgccagccacagggctcttgtgaaggctagaggcaccagaccttttgtgatcagcaggtccacctttgctggccatggcagatatgctggccactggactggggatgtgtggtctagttgggagcagctggctagctctgtgcctgagatcctgcagttcaacctgctgggagtgccccttgttggagcagatgtgtgtggcttcctgggcaacacctcagaggaactgtgtgtcagatggactcagctgggagcattctaccctttcatgagaaaccacaacagcctgctgagcctgcctcaagagccttacagcttttctgagccagcacagcaggccatgagaaaggccctgactctgagatatgccctgctgcctcacctgtacaccctgttccatcaggctcatgtggctggggagactgtggctagacccctgttcctggaattccccaaggacagctccacctggacagtggatcatcagctgctgtggggagaagccctgctgattacacctgtgctgcaggctggcaaggctgaagtgacaggctacttccctcttggcacttggtatgacctgcagacagtgcctgtggaagctctgggatctctgcctccacctcctgctgctcctagagagcctgccattcactctgaaggccagtgggttaccctgcctgctccactggataccatcaatgtgcatctgagagcaggctacatcatccctctgcaaggccctggcctgaccaccacagaatctagacagcagccaatggcactggctgtggccctgaccaaaggtggagaagctagaggggagctgttctgggatgatggggagagcctggaagtgctggaaagaggggcctatacacaagtgatttttctggctaggaacaataccattgtgaatgagcttgtcagagtcacctctgaaggtgctggcctgcagctccagaaagtgacagtgcttggagtggccacagcaccccagcaagtgctgtctaatggggtgccagtgtccaacttcacatacagccctgataccaaggtcctggacatctgtgtgtccctgcttatgggagagcagttcctggtgtcttggtgc

SEQ ID NO: 667 - DNA, 3405 bp, synthetic construct
  source 1..3405: mol_type = other DNA
gacatccagatgacccagagccccagcagcctgtctgcctctgtgggtgacagggtgaccattacctgcagagccagccaaagcatcagcagctacctgaactggtaccagcagaagccaggcaaggcccctaagctgctgatctatgctgccagcagcctgcaatctggagtgcctagcagattcagtggctctggctcaggcacagacttcaccctgaccatctccagcctccagcctgaggattttgccacctactactgccagcagagctacagcaccccccctatcacctttggccagggcaccagactggaaatcaagggaggaggaggctctggaggaggaggctctggagggggaggctctgaggtgcagctggtggagtctgggggaggcctggtgcagcctggaggctccctgaggctgagctgtgctgcctcaggcttcaccttcaacatctttgaaatgaactgggtcagacaggcccctggcaaaggcctggaatggatcagctacatcagcagcagaggcacaacaacatactatgctgactctgtgagaggcaggttcacaatcagcagagacaatgccaagaacagcctgtacctgcagatgaacagcctgagagcagaggatacagctgtgtactactgtgccagagactatgaggccaccatcccctttgatttctggggccagggcaccctggttacagtgtccagtggtgggggtggctctgggggtggaggcagtgcccatcctggcagacctagagctgtgcccacacagtgtgatgtgcctccaaacagcagatttgactgtgcccctgacaaggccatcacacaagagcagtgtgaagccagaggctgctgttacatccctgccaagcaaggactgcaaggggctcagatgggacagccctggtgcttcttcccaccatcttaccccagctacaagctggaaaacctgagcagctctgagatgggctacactgctacactgaccagaaccacacctacattcttcccaaaggacatcctgacactgaggctggatgtgatgatggaaacagagaacaggctgcacttcaccatcaaggaccctgccaatagaagatatgaggtgcccctggaaacccctcatgtgcactctagagccccatctccactgtactctgtggaattttctgaggaaccctttggggtcatagtcagaaggcagctggatggcagagtgctgctgaacacaactgtggcccctctgttctttgctgatcagttcctgcagctgagcaccagcctgcctagccagtatatcacaggcctggcagagcacctgtctccactgatgctgagcacatcctggaccagaatcaccctgtggaacagagacctggctcccacacctggggccaacctgtatggctctcaccccttctatctggccctggaagatggtggttcagcccatggtgtctttctgctgaactccaatgccatggatgtggtgctgcagccctctcctgctctgtcttggagaagcactggtggcatcctggatgtgtacatctttctgggccctgagcctaagtctgtggtgcagcagtacctggatgttgtgggctaccccttcatgcctccttattggggcctgggcttccacctgtgcagatggggatacagcagcacagccatcaccagacaggttgtggaaaacatgaccagagcacacttcccactggatgtgcagtggaatgacctggactacatggacagcagaagggacttcaccttcaacaaggatggcttcagagacttccctgccatggtgcaagagctgcaccaaggtggtagaagatatatgatgattgtggacccagccatcagctcctctggaccagctggcagctacagaccctatgatgagggactgagaagaggggtgttcatcaccaatgagacaggccagcctctgattggcaaagtgtggccaggctccacagcctttccagatttcacaaaccccacagctctggcttggtgggaagatatggtggcagagttccatgatcaggtgccctttgatggcatgtggattgacatgaatgagcccagcaacttcatcaggggctctgaggatggatgccccaacaatgaactggaaaatcctccttatgtgcctggtgttgttggagggacactgcaggcagccacaatttgtgccagctctcaccagtttctgagcacccactacaacctgcacaatctgtatggcctgactgaggccattgccagccacagggctcttgtgaaggctagaggcaccagaccttttgtgatcagcaggtccacctttgctggccatggcagatatgctggccactggactggggatgtgtggtctagttgggagcagctggctagctctgtgcctgagatcctgcagttcaacctgctgggagtgccccttgttggagcagatgtgtgtggcttcctgggcaacacctcagaggaactgtgtgtcagatggactcagctgggagcattctaccctttcatgagaaaccacaacagcctgctgagcctgcctcaagagccttacagcttttctgagccagcacagcaggccatgagaaaggccctgactctgagatatgccctgctgcctcacctgtacaccctgttccatcaggctcatgtggctggggagactgtggctagacccctgttcctggaattccccaaggacagctccacctggacagtggatcatcagctgctgtggggagaagccctgctgattacacctgtgctgcaggctggcaaggctgaagtgacaggctacttccctcttggcacttggtatgacctgcagacagtgcctgtggaagctctgggatctctgcctccacctcctgctgctcctagagagcctgccattcactctgaaggccagtgggttaccctgcctgctccactggataccatcaatgtgcatctgagagcaggctacatcatccctctgcaaggccctggcctgaccaccacagaatctagacagcagccaatggcactggctgtggccctgaccaaaggtggagaagctagaggggagctgttctgggatgatggggagagcctggaagtgctggaaagaggggcctatacacaagtgatttttctggctaggaacaataccattgtgaatgagcttgtcagagtcacctctgaaggtgctggcctgcagctccagaaagtgacagtgcttggagtggccacagcaccccagcaagtgctgtctaatggggtgccagtgtccaacttcacatacagccctgataccaaggtcctggacatctgtgtgtccctgcttatgggagagcagttcctggtgtcttggtgc

SEQ ID NO: 668 - DNA, 3405 bp, synthetic construct
  source 1..3405: mol_type = other DNA
gatatccaaatgacccagagccccagctccctgtcagcctctgtgggagacagagtgaccatcacatgcagagccagccagagcatcagcagctacctgaactggtaccagcagaagcctggcaaggcccccaagctgctgatctatgctgccagcagcctgcagtctggagtgccttccagattctctggctcaggcagtggcacagacttcaccctgacaatcagcagcctgcagcctgaagactttgccacctactactgccagcagagctacagcacaccacctatcacctttggccagggcaccagactggagatcaaagggggtgggggctctggggggggaggcagtggaggaggtggctctgaagtccagctggtggagtctggaggaggcctggtgcagcctggaggcagcctgaggctgtcctgtgcagcctctggcttcaccttcaacatctttgagatgaactgggttaggcaggcccctggcaagggcctggaatggatcagctacattagcagcagaggcaccacaacctactatgctgactctgtgaggggcagattcaccatcagcagagataatgccaagaacagcctgtacctgcagatgaacagcctcagagctgaggacacagctgtgtactactgtgccagagattatgaggccaccatcccctttgacttctggggccaaggcaccctggtgacagtgtcttctggaggtggaggctctggaggaggtggcagtgcccatcctggcagacctagagctgtgcccacacagtgtgatgtgcctccaaacagcagatttgactgtgcccctgacaaggccatcacacaagagcagtgtgaagccagaggctgctgttacatccctgccaagcaaggactgcaaggggctcagatgggacagccctggtgcttcttcccaccatcttaccccagctacaagctggaaaacctgagcagctctgagatgggctacactgctacactgaccagaaccacacctacattcttcccaaaggacatcctgacactgaggctggatgtgatgatggaaacagagaacaggctgcacttcaccatcaaggaccctgccaatagaagatatgaggtgcccctggaaacccctcatgtgcactctagagccccatctccactgtactctgtggaattttctgaggaaccctttggggtcatagtcagaaggcagctggatggcagagtgctgctgaacacaactgtggcccctctgttctttgctgatcagttcctgcagctgagcaccagcctgcctagccagtatatcacaggcctggcagagcacctgtctccactgatgctgagcacatcctggaccagaatcaccctgtggaacagagacctggctcccacacctggggccaacctgtatggctctcaccccttctatctggccctggaagatggtggttcagcccatggtgtctttctgctgaactccaatgccatggatgtggtgctgcagccctctcctgctctgtcttggagaagcactggtggcatcctggatgtgtacatctttctgggccctgagcctaagtctgtggtgcagcagtacctggatgttgtgggctaccccttcatgcctccttattggggcctgggcttccacctgtgcagatggggatacagcagcacagccatcaccagacaggttgtggaaaacatgaccagagcacacttcccactggatgtgcagtggaatgacctggactacatggacagcagaagggacttcaccttcaacaaggatggcttcagagacttccctgccatggtgcaagagctgcaccaaggtggtagaagatatatgatgattgtggacccagccatcagctcctctggaccagctggcagctacagaccctatgatgagggactgagaagaggggtgttcatcaccaatgagacaggccagcctctgattggcaaagtgtggccaggctccacagcctttccagatttcacaaaccccacagctctggcttggtgggaagatatggtggcagagttccatgatcaggtgccctttgatggcatgtggattgacatgaatgagcccagcaacttcatcaggggctctgaggatggatgccccaacaatgaactggaaaatcctccttatgtgcctggtgttgttggagggacactgcaggcagccacaatttgtgccagctctcaccagtttctgagcacccactacaacctgcacaatctgtatggcctgactgaggccattgccagccacagggctcttgtgaaggctagaggcaccagaccttttgtgatcagcaggtccacctttgctggccatggcagatatgctggccactggactggggatgtgtggtctagttgggagcagctggctagctctgtgcctgagatcctgcagttcaacctgctgggagtgccccttgttggagcagatgtgtgtggcttcctgggcaacacctcagaggaactgtgtgtcagatggactcagctgggagcattctaccctttcatgagaaaccacaacagcctgctgagcctgcctcaagagccttacagcttttctgagccagcacagcaggccatgagaaaggccctgactctgagatatgccctgctgcctcacctgtacaccctgttccatcaggctcatgtggctggggagactgtggctagacccctgttcctggaattccccaaggacagctccacctggacagtggatcatcagctgctgtggggagaagccctgctgattacacctgtgctgcaggctggcaaggctgaagtgacaggctacttccctcttggcacttggtatgacctgcagacagtgcctgtggaagctctgggatctctgcctccacctcctgctgctcctagagagcctgccattcactctgaaggccagtgggttaccctgcctgctccactggataccatcaatgtgcatctgagagcaggctacatcatccctctgcaaggccctggcctgaccaccacagaatctagacagcagccaatggcactggctgtggccctgaccaaaggtggagaagctagaggggagctgttctgggatgatggggagagcctggaagtgctggaaagaggggcctatacacaagtgatttttctggctaggaacaataccattgtgaatgagcttgtcagagtcacctctgaaggtgctggcctgcagctccagaaagtgacagtgcttggagtggccacagcaccccagcaagtgctgtctaatggggtgccagtgtccaacttcacatacagccctgataccaaggtcctggacatctgtgtgtccctgcttatgggagagcagttcctggtgtcttggtgc

SEQ ID NO: 669 - DNA, 3411 bp, synthetic construct
  source 1..3411: mol_type = other DNA
gacatccagatgacacagagcccctctagcctgtctgcctctgtgggagacagagtgaccatcacctgtagagccagccagagcatcagcagctacctgaactggtatcagcagaagcctggcaaggcccctaaactgctgatctatgctgccagcagcctgcagtctggggtgccctctagattttctggcagtggctctggcacagacttcaccctgaccataagctccctgcagcctgaggactttgccacctactactgtcagcagagctacagcacccctcctatcacctttggccagggcaccagactggaaatcaaaggtggtggtggaagtggtggtggtggcagtggtggtggtggatctgaagtgcagctggtggaaagtggtggtggcctggttcagcctggcagatccctgagactgagctgtgcagcctctggctttacctttgatgactatgccatgaactgggtcagacaggccccaggcaaaggcctggaatgggtgtcaggcatctcttggtcctctggctccatggactatgctgactctgtgaagggcagattcaccatcagcagagacaatgccaagaacagcctgtacctgcagatgaactccctgagaacagaggacacagccctgtactactgtgccaaggccagagaagtgggagactactatggcatggatgtgtggggccagggaaccacagtgacagtcagtagtggtggtggtggcagtggtggtggtggttctgcccatcctggcagacctagagctgtgcccacacagtgtgatgtgcctccaaacagcagatttgactgtgcccctgacaaggccatcacacaagagcagtgtgaagccagaggctgctgttacatccctgccaagcaaggactgcaaggggctcagatgggacagccctggtgcttcttcccaccatcttaccccagctacaagctggaaaacctgagcagctctgagatgggctacactgctacactgaccagaaccacacctacattcttcccaaaggacatcctgacactgaggctggatgtgatgatggaaacagagaacaggctgcacttcaccatcaaggaccctgccaatagaagatatgaggtgcccctggaaacccctcatgtgcactctagagccccatctccactgtactctgtggaattttctgaggaaccctttggggtcatagtcagaaggcagctggatggcagagtgctgctgaacacaactgtggcccctctgttctttgctgatcagttcctgcagctgagcaccagcctgcctagccagtatatcacaggcctggcagagcacctgtctccactgatgctgagcacatcctggaccagaatcaccctgtggaacagagacctggctcccacacctggggccaacctgtatggctctcaccccttctatctggccctggaagatggtggttcagcccatggtgtctttctgctgaactccaatgccatggatgtggtgctgcagccctctcctgctctgtcttggagaagcactggtggcatcctggatgtgtacatctttctgggccctgagcctaagtctgtggtgcagcagtacctggatgttgtgggctaccccttcatgcctccttattggggcctgggcttccacctgtgcagatggggatacagcagcacagccatcaccagacaggttgtggaaaacatgaccagagcacacttcccactggatgtgcagtggaatgacctggactacatggacagcagaagggacttcaccttcaacaaggatggcttcagagacttccctgccatggtgcaagagctgcaccaaggtggtagaagatatatgatgattgtggacccagccatcagctcctctggaccagctggcagctacagaccctatgatgagggactgagaagaggggtgttcatcaccaatgagacaggccagcctctgattggcaaagtgtggccaggctccacagcctttccagatttcacaaaccccacagctctggcttggtgggaagatatggtggcagagttccatgatcaggtgccctttgatggcatgtggattgacatgaatgagcccagcaacttcatcaggggctctgaggatggatgccccaacaatgaactggaaaatcctccttatgtgcctggtgttgttggagggacactgcaggcagccacaatttgtgccagctctcaccagtttctgagcacccactacaacctgcacaatctgtatggcctgactgaggccattgccagccacagggctcttgtgaaggctagaggcaccagaccttttgtgatcagcaggtccacctttgctggccatggcagatatgctggccactggactggggatgtgtggtctagttgggagcagctggctagctctgtgcctgagatcctgcagttcaacctgctgggagtgccccttgttggagcagatgtgtgtggcttcctgggcaacacctcagaggaactgtgtgtcagatggactcagctgggagcattctaccctttcatgagaaaccacaacagcctgctgagcctgcctcaagagccttacagcttttctgagccagcacagcaggccatgagaaaggccctgactctgagatatgccctgctgcctcacctgtacaccctgttccatcaggctcatgtggctggggagactgtggctagacccctgttcctggaattccccaaggacagctccacctggacagtggatcatcagctgctgtggggagaagccctgctgattacacctgtgctgcaggctggcaaggctgaagtgacaggctacttccctcttggcacttggtatgacctgcagacagtgcctgtggaagctctgggatctctgcctccacctcctgctgctcctagagagcctgccattcactctgaaggccagtgggttaccctgcctgctccactggataccatcaatgtgcatctgagagcaggctacatcatccctctgcaaggccctggcctgaccaccacagaatctagacagcagccaatggcactggctgtggccctgaccaaaggtggagaagctagaggggagctgttctgggatgatggggagagcctggaagtgctggaaagaggggcctatacacaagtgatttttctggctaggaacaataccattgtgaatgagcttgtcagagtcacctctgaaggtgctggcctgcagctccagaaagtgacagtgcttggagtggccacagcaccccagcaagtgctgtctaatggggtgccagtgtccaacttcacatacagccctgataccaaggtcctggacatctgtgtgtccctgcttatgggagagcagttcctggtgtcttggtgc

SEQ ID NO: 670 - DNA, 3411 bp, synthetic construct
  source 1..3411: mol_type = other DNA
gatatccagatgacccagagccccagcagcctgtctgccagtgtgggggatagagtgaccatcacctgcagggccagccagagcatcagcagctacctcaactggtaccagcaaaagcctggcaaggcccccaaactgctgatttatgctgccagcagcctgcagtctggggtcccttccagattctctggctctggctctggcacagacttcaccctgaccatcagcagcctgcagccagaggactttgccacatactactgccagcagagctacagcaccccccctatcacctttggccagggcaccaggctggagatcaagggaggtgggggctcaggaggaggtggctctggaggaggaggctcagaggtgcagctggttgagagtggaggaggcctggtgcagcctggcagaagcctgagactgagctgtgctgcctctggcttcacctttgatgactatgccatgaactgggtgagacaggcccctggcaagggcctggaatgggtgtctggcatctcctggagctctggcagcatggactatgctgactctgtgaagggcaggttcaccatcagcagagacaatgccaagaacagcctgtacctgcagatgaacagcctgagaacagaagacacagccctgtactactgtgcaaaagccagagaagtgggagactactatggcatggatgtgtggggccaaggcaccacagtgacagtgagcagtggtggaggtggctcagggggaggaggcagtgcccatcctggcagacctagagctgtgcccacacagtgtgatgtgcctccaaacagcagatttgactgtgcccctgacaaggccatcacacaagagcagtgtgaagccagaggctgctgttacatccctgccaagcaaggactgcaaggggctcagatgggacagccctggtgcttcttcccaccatcttaccccagctacaagctggaaaacctgagcagctctgagatgggctacactgctacactgaccagaaccacacctacattcttcccaaaggacatcctgacactgaggctggatgtgatgatggaaacagagaacaggctgcacttcaccatcaaggaccctgccaatagaagatatgaggtgcccctggaaacccctcatgtgcactctagagccccatctccactgtactctgtggaattttctgaggaaccctttggggtcatagtcagaaggcagctggatggcagagtgctgctgaacacaactgtggcccctctgttctttgctgatcagttcctgcagctgagcaccagcctgcctagccagtatatcacaggcctggcagagcacctgtctccactgatgctgagcacatcctggaccagaatcaccctgtggaacagagacctggctcccacacctggggccaacctgtatggctctcaccccttctatctggccctggaagatggtggttcagcccatggtgtctttctgctgaactccaatgccatggatgtggtgctgcagccctctcctgctctgtcttggagaagcactggtggcatcctggatgtgtacatctttctgggccctgagcctaagtctgtggtgcagcagtacctggatgttgtgggctaccccttcatgcctccttattggggcctgggcttccacctgtgcagatggggatacagcagcacagccatcaccagacaggttgtggaaaacatgaccagagcacacttcccactggatgtgcagtggaatgacctggactacatggacagcagaagggacttcaccttcaacaaggatggcttcagagacttccctgccatggtgcaagagctgcaccaaggtggtagaagatatatgatgattgtggacccagccatcagctcctctggaccagctggcagctacagaccctatgatgagggactgagaagaggggtgttcatcaccaatgagacaggccagcctctgattggcaaagtgtggccaggctccacagcctttccagatttcacaaaccccacagctctggcttggtgggaagatatggtggcagagttccatgatcaggtgccctttgatggcatgtggattgacatgaatgagcccagcaacttcatcaggggctctgaggatggatgccccaacaatgaactggaaaatcctccttatgtgcctggtgttgttggagggacactgcaggcagccacaatttgtgccagctctcaccagtttctgagcacccactacaacctgcacaatctgtatggcctgactgaggccattgccagccacagggctcttgtgaaggctagaggcaccagaccttttgtgatcagcaggtccacctttgctggccatggcagatatgctggccactggactggggatgtgtggtctagttgggagcagctggctagctctgtgcctgagatcctgcagttcaacctgctgggagtgccccttgttggagcagatgtgtgtggcttcctgggcaacacctcagaggaactgtgtgtcagatggactcagctgggagcattctaccctttcatgagaaaccacaacagcctgctgagcctgcctcaagagccttacagcttttctgagccagcacagcaggccatgagaaaggccctgactctgagatatgccctgctgcctcacctgtacaccctgttccatcaggctcatgtggctggggagactgtggctagacccctgttcctggaattccccaaggacagctccacctggacagtggatcatcagctgctgtggggagaagccctgctgattacacctgtgctgcaggctggcaaggctgaagtgacaggctacttccctcttggcacttggtatgacctgcagacagtgcctgtggaagctctgggatctctgcctccacctcctgctgctcctagagagcctgccattcactctgaaggccagtgggttaccctgcctgctccactggataccatcaatgtgcatctgagagcaggctacatcatccctctgcaaggccctggcctgaccaccacagaatctagacagcagccaatggcactggctgtggccctgaccaaaggtggagaagctagaggggagctgttctgggatgatggggagagcctggaagtgctggaaagaggggcctatacacaagtgatttttctggctaggaacaataccattgtgaatgagcttgtcagagtcacctctgaaggtgctggcctgcagctccagaaagtgacagtgcttggagtggccacagcaccccagcaagtgctgtctaatggggtgccagtgtccaacttcacatacagccctgataccaaggtcctggacatctgtgtgtccctgcttatgggagagcagttcctggtgtcttggtgc

SEQ ID NO: 671 - DNA, 3411 bp, synthetic construct
  source 1..3411: mol_type = other DNA
gacatccagatgacccagagccccagctccctgtcagccagtgtgggtgacagagtgaccatcacctgcagagccagccagagcatcagcagctacctgaactggtaccagcagaaacctggcaaagcccccaagctgctgatttatgctgctagcagcctgcagagtggagtgcccagcagattctcaggcagtggctctggcacagacttcaccctgaccatctccagcctgcagccagaagactttgccacctactactgccagcagagctacagcacccctcctatcacctttggccagggcacaagactggagatcaagggaggaggaggctctggaggaggaggctctggagggggaggctctgaggtccaactggttgaatctggagggggcctggtgcaacctggcaggagcctgagactgagctgtgctgcctctggcttcacctttgatgactatgccatgaactgggtgagacaggcccctggcaagggcctggagtgggtgtctggcatcagctggagctctggcagcatggactatgcagattctgtgaagggcaggttcaccatcagcagagataatgccaagaacagcctgtacctgcagatgaacagcctcaggacagaggacacagccctgtactactgtgccaaggccagagaagtgggtgactactatggcatggatgtgtggggccagggcaccacagtgacagtgagctctgggggaggaggctcaggtgggggtggcagtgcccatcctggcagacctagagctgtgcccacacagtgtgatgtgcctccaaacagcagatttgactgtgcccctgacaaggccatcacacaagagcagtgtgaagccagaggctgctgttacatccctgccaagcaaggactgcaaggggctcagatgggacagccctggtgcttcttcccaccatcttaccccagctacaagctggaaaacctgagcagctctgagatgggctacactgctacactgaccagaaccacacctacattcttcccaaaggacatcctgacactgaggctggatgtgatgatggaaacagagaacaggctgcacttcaccatcaaggaccctgccaatagaagatatgaggtgcccctggaaacccctcatgtgcactctagagccccatctccactgtactctgtggaattttctgaggaaccctttggggtcatagtcagaaggcagctggatggcagagtgctgctgaacacaactgtggcccctctgttctttgctgatcagttcctgcagctgagcaccagcctgcctagccagtatatcacaggcctggcagagcacctgtctccactgatgctgagcacatcctggaccagaatcaccctgtggaacagagacctggctcccacacctggggccaacctgtatggctctcaccccttctatctggccctggaagatggtggttcagcccatggtgtctttctgctgaactccaatgccatggatgtggtgctgcagccctctcctgctctgtcttggagaagcactggtggcatcctggatgtgtacatctttctgggccctgagcctaagtctgtggtgcagcagtacctggatgttgtgggctaccccttcatgcctccttattggggcctgggcttccacctgtgcagatggggatacagcagcacagccatcaccagacaggttgtggaaaacatgaccagagcacacttcccactggatgtgcagtggaatgacctggactacatggacagcagaagggacttcaccttcaacaaggatggcttcagagacttccctgccatggtgcaagagctgcaccaaggtggtagaagatatatgatgattgtggacccagccatcagctcctctggaccagctggcagctacagaccctatgatgagggactgagaagaggggtgttcatcaccaatgagacaggccagcctctgattggcaaagtgtggccaggctccacagcctttccagatttcacaaaccccacagctctggcttggtgggaagatatggtggcagagttccatgatcaggtgccctttgatggcatgtggattgacatgaatgagcccagcaacttcatcaggggctctgaggatggatgccccaacaatgaactggaaaatcctccttatgtgcctggtgttgttggagggacactgcaggcagccacaatttgtgccagctctcaccagtttctgagcacccactacaacctgcacaatctgtatggcctgactgaggccattgccagccacagggctcttgtgaaggctagaggcaccagaccttttgtgatcagcaggtccacctttgctggccatggcagatatgctggccactggactggggatgtgtggtctagttgggagcagctggctagctctgtgcctgagatcctgcagttcaacctgctgggagtgccccttgttggagcagatgtgtgtggcttcctgggcaacacctcagaggaactgtgtgtcagatggactcagctgggagcattctaccctttcatgagaaaccacaacagcctgctgagcctgcctcaagagccttacagcttttctgagccagcacagcaggccatgagaaaggccctgactctgagatatgccctgctgcctcacctgtacaccctgttccatcaggctcatgtggctggggagactgtggctagacccctgttcctggaattccccaaggacagctccacctggacagtggatcatcagctgctgtggggagaagccctgctgattacacctgtgctgcaggctggcaaggctgaagtgacaggctacttccctcttggcacttggtatgacctgcagacagtgcctgtggaagctctgggatctctgcctccacctcctgctgctcctagagagcctgccattcactctgaaggccagtgggttaccctgcctgctccactggataccatcaatgtgcatctgagagcaggctacatcatccctctgcaaggccctggcctgaccaccacagaatctagacagcagccaatggcactggctgtggccctgaccaaaggtggagaagctagaggggagctgttctgggatgatggggagagcctggaagtgctggaaagaggggcctatacacaagtgatttttctggctaggaacaataccattgtgaatgagcttgtcagagtcacctctgaaggtgctggcctgcagctccagaaagtgacagtgcttggagtggccacagcaccccagcaagtgctgtctaatggggtgccagtgtccaacttcacatacagccctgataccaaggtcctggacatctgtgtgtccctgcttatgggagagcagttcctggtgtcttggtgc

SEQ ID NO: 672 - DNA, 4014 bp, synthetic construct
  source 1..4014: mol_type = other DNA
ctgcgcgctcgctcgctcactgaggccgcccgggcaaagcccgggcgtcgggcgacctttggtcgcccggcctcagtgagcgagcgagcgcgcagagagggagtggccaactccatcactaggggttcctagatctcttaggtcagtgaagagaagaacaaaaagcagcatattacagttagttgtcttcatcaatctttaaatatgttgtgtggtttttctctccctgtttccacagttgacatccagatgacacagagcccctctagcctgtctgcctctgtgggagacagagtgaccatcacctgtagagccagccagagcatcagcagctacctgaactggtatcagcagaagcctggcaaggcccctaaactgctgatctatgctgccagcagcctgcagtctggggtgccctctagattttctggcagtggctctggcacagacttcaccctgaccataagctccctgcagcctgaggactttgccacctactactgtcagcagagctacagcacccctcctatcacctttggccagggcaccagactggaaatcaaaggtggtggtggaagtggtggtggtggcagtggtggtggtggatctgaagtgcagctggtggaaagtggtggtggcctggttcagcctggtggctctctgagactgagctgtgcagcctctggcttcaccttcaacatctttgagatgaactgggtcagacaggccccaggcaaaggcctggaatggatcagctacatcagctccagaggcaccacaacctactatgctgactctgtcagaggcaggttcaccatcagcagagacaatgccaagaacagcctgtacctgcagatgaactccctgagagctgaggacacagcagtgtactactgtgccagggactatgaggctacaatcccctttgacttctggggccagggaaccctggtcacagttagcagtggtggtggtggtagtggtggtggtggctctgcccatcctggcagacctagagctgtgcccacacagtgtgatgtgcctccaaacagcagatttgactgtgcccctgacaaggccatcacacaagagcagtgtgaagccagaggctgctgttacatccctgccaagcaaggactgcaaggggctcagatgggacagccctggtgcttcttcccaccatcttaccccagctacaagctggaaaacctgagcagctctgagatgggctacactgctacactgaccagaaccacacctacattcttcccaaaggacatcctgacactgaggctggatgtgatgatggaaacagagaacaggctgcacttcaccatcaaggaccctgccaatagaagatatgaggtgcccctggaaacccctcatgtgcactctagagccccatctccactgtactctgtggaattttctgaggaaccctttggggtcatagtcagaaggcagctggatggcagagtgctgctgaacacaactgtggcccctctgttctttgctgatcagttcctgcagctgagcaccagcctgcctagccagtatatcacaggcctggcagagcacctgtctccactgatgctgagcacatcctggaccagaatcaccctgtggaacagagacctggctcccacacctggggccaacctgtatggctctcaccccttctatctggccctggaagatggtggttcagcccatggtgtctttctgctgaactccaatgccatggatgtggtgctgcagccctctcctgctctgtcttggagaagcactggtggcatcctggatgtgtacatctttctgggccctgagcctaagtctgtggtgcagcagtacctggatgttgtgggctaccccttcatgcctccttattggggcctgggcttccacctgtgcagatggggatacagcagcacagccatcaccagacaggttgtggaaaacatgaccagagcacacttcccactggatgtgcagtggaatgacctggactacatggacagcagaagggacttcaccttcaacaaggatggcttcagagacttccctgccatggtgcaagagctgcaccaaggtggtagaagatatatgatgattgtggacccagccatcagctcctctggaccagctggcagctacagaccctatgatgagggactgagaagaggggtgttcatcaccaatgagacaggccagcctctgattggcaaagtgtggccaggctccacagcctttccagatttcacaaaccccacagctctggcttggtgggaagatatggtggcagagttccatgatcaggtgccctttgatggcatgtggattgacatgaatgagcccagcaacttcatcaggggctctgaggatggatgccccaacaatgaactggaaaatcctccttatgtgcctggtgttgttggagggacactgcaggcagccacaatttgtgccagctctcaccagtttctgagcacccactacaacctgcacaatctgtatggcctgactgaggccattgccagccacagggctcttgtgaaggctagaggcaccagaccttttgtgatcagcaggtccacctttgctggccatggcagatatgctggccactggactggggatgtgtggtctagttgggagcagctggctagctctgtgcctgagatcctgcagttcaacctgctgggagtgccccttgttggagcagatgtgtgtggcttcctgggcaacacctcagaggaactgtgtgtcagatggactcagctgggagcattctaccctttcatgagaaaccacaacagcctgctgagcctgcctcaagagccttacagcttttctgagccagcacagcaggccatgagaaaggccctgactctgagatatgccctgctgcctcacctgtacaccctgttccatcaggctcatgtggctggggagactgtggctagacccctgttcctggaattccccaaggacagctccacctggacagtggatcatcagctgctgtggggagaagccctgctgattacacctgtgctgcaggctggcaaggctgaagtgacaggctacttccctcttggcacttggtatgacctgcagacagtgcctgtggaagctctgggatctctgcctccacctcctgctgctcctagagagcctgccattcactctgaaggccagtgggttaccctgcctgctccactggataccatcaatgtgcatctgagagcaggctacatcatccctctgcaaggccctggcctgaccaccacagaatctagacagcagccaatggcactggctgtggccctgaccaaaggtggagaagctagaggggagctgttctgggatgatggggagagcctggaagtgctggaaagaggggcctatacacaagtgatttttctggctaggaacaataccattgtgaatgagcttgtcagagtcacctctgaaggtgctggcctgcagctccagaaagtgacagtgcttggagtggccacagcaccccagcaagtgctgtctaatggggtgccagtgtccaacttcacatacagccctgataccaaggtcctggacatctgtgtgtccctgcttatgggagagcagttcctggtgtcttggtgctaataatcagccataccacatttgtagaggttttacttgctttaaaaaacctcccacacctccccctgaacctgaaacataaaatgaatgcaattgttgttgttaacttgtttattgcagcttataatggttacaaataaagcaatagcatcacaaatttcacaaataaagcatttttttcactgcattctagttgtggtttgtccaaactcatcaatgtatcttatcatgtcagatctaggaacccctagtgatggagttggccactccctctctgcgcgctcgctcgctcactgaggccgggcgaccaaaggtcgcccgacgcccgggctttgcccgggcggcctcagtgagcgagcgagcgcgcag

SEQ ID NO: 673 - DNA, 4014 bp, synthetic construct
  source 1..4014: mol_type = other DNA
ctgcgcgctcgctcgctcactgaggccgcccgggcaaagcccgggcgtcgggcgacctttggtcgcccggcctcagtgagcgagcgagcgcgcagagagggagtggccaactccatcactaggggttcctagatctcttaggtcagtgaagagaagaacaaaaagcagcatattacagttagttgtcttcatcaatctttaaatatgttgtgtggtttttctctccctgtttccacagttgacatccagatgacccagagccccagcagcctgtctgcctctgtgggtgacagggtgaccattacctgcagagccagccaaagcatcagcagctacctgaactggtaccagcagaagccaggcaaggcccctaagctgctgatctatgctgccagcagcctgcaatctggagtgcctagcagattcagtggctctggctcaggcacagacttcaccctgaccatctccagcctccagcctgaggattttgccacctactactgccagcagagctacagcaccccccctatcacctttggccagggcaccagactggaaatcaagggaggaggaggctctggaggaggaggctctggagggggaggctctgaggtgcagctggtggagtctgggggaggcctggtgcagcctggaggctccctgaggctgagctgtgctgcctcaggcttcaccttcaacatctttgaaatgaactgggtcagacaggcccctggcaaaggcctggaatggatcagctacatcagcagcagaggcacaacaacatactatgctgactctgtgagaggcaggttcacaatcagcagagacaatgccaagaacagcctgtacctgcagatgaacagcctgagagcagaggatacagctgtgtactactgtgccagagactatgaggccaccatcccctttgatttctggggccagggcaccctggttacagtgtccagtggtgggggtggctctgggggtggaggcagtgcccatcctggcagacctagagctgtgcccacacagtgtgatgtgcctccaaacagcagatttgactgtgcccctgacaaggccatcacacaagagcagtgtgaagccagaggctgctgttacatccctgccaagcaaggactgcaaggggctcagatgggacagccctggtgcttcttcccaccatcttaccccagctacaagctggaaaacctgagcagctctgagatgggctacactgctacactgaccagaaccacacctacattcttcccaaaggacatcctgacactgaggctggatgtgatgatggaaacagagaacaggctgcacttcaccatcaaggaccctgccaatagaagatatgaggtgcccctggaaacccctcatgtgcactctagagccccatctccactgtactctgtggaattttctgaggaaccctttggggtcatagtcagaaggcagctggatggcagagtgctgctgaacacaactgtggcccctctgttctttgctgatcagttcctgcagctgagcaccagcctgcctagccagtatatcacaggcctggcagagcacctgtctccactgatgctgagcacatcctggaccagaatcaccctgtggaacagagacctggctcccacacctggggccaacctgtatggctctcaccccttctatctggccctggaagatggtggttcagcccatggtgtctttctgctgaactccaatgccatggatgtggtgctgcagccctctcctgctctgtcttggagaagcactggtggcatcctggatgtgtacatctttctgggccctgagcctaagtctgtggtgcagcagtacctggatgttgtgggctaccccttcatgcctccttattggggcctgggcttccacctgtgcagatggggatacagcagcacagccatcaccagacaggttgtggaaaacatgaccagagcacacttcccactggatgtgcagtggaatgacctggactacatggacagcagaagggacttcaccttcaacaaggatggcttcagagacttccctgccatggtgcaagagctgcaccaaggtggtagaagatatatgatgattgtggacccagccatcagctcctctggaccagctggcagctacagaccctatgatgagggactgagaagaggggtgttcatcaccaatgagacaggccagcctctgattggcaaagtgtggccaggctccacagcctttccagatttcacaaaccccacagctctggcttggtgggaagatatggtggcagagttccatgatcaggtgccctttgatggcatgtggattgacatgaatgagcccagcaacttcatcaggggctctgaggatggatgccccaacaatgaactggaaaatcctccttatgtgcctggtgttgttggagggacactgcaggcagccacaatttgtgccagctctcaccagtttctgagcacccactacaacctgcacaatctgtatggcctgactgaggccattgccagccacagggctcttgtgaaggctagaggcaccagaccttttgtgatcagcaggtccacctttgctggccatggcagatatgctggccactggactggggatgtgtggtctagttgggagcagctggctagctctgtgcctgagatcctgcagttcaacctgctgggagtgccccttgttggagcagatgtgtgtggcttcctgggcaacacctcagaggaactgtgtgtcagatggactcagctgggagcattctaccctttcatgagaaaccacaacagcctgctgagcctgcctcaagagccttacagcttttctgagccagcacagcaggccatgagaaaggccctgactctgagatatgccctgctgcctcacctgtacaccctgttccatcaggctcatgtggctggggagactgtggctagacccctgttcctggaattccccaaggacagctccacctggacagtggatcatcagctgctgtggggagaagccctgctgattacacctgtgctgcaggctggcaaggctgaagtgacaggctacttccctcttggcacttggtatgacctgcagacagtgcctgtggaagctctgggatctctgcctccacctcctgctgctcctagagagcctgccattcactctgaaggccagtgggttaccctgcctgctccactggataccatcaatgtgcatctgagagcaggctacatcatccctctgcaaggccctggcctgaccaccacagaatctagacagcagccaatggcactggctgtggccctgaccaaaggtggagaagctagaggggagctgttctgggatgatggggagagcctggaagtgctggaaagaggggcctatacacaagtgatttttctggctaggaacaataccattgtgaatgagcttgtcagagtcacctctgaaggtgctggcctgcagctccagaaagtgacagtgcttggagtggccacagcaccccagcaagtgctgtctaatggggtgccagtgtccaacttcacatacagccctgataccaaggtcctggacatctgtgtgtccctgcttatgggagagcagttcctggtgtcttggtgctaataatcagccataccacatttgtagaggttttacttgctttaaaaaacctcccacacctccccctgaacctgaaacataaaatgaatgcaattgttgttgttaacttgtttattgcagcttataatggttacaaataaagcaatagcatcacaaatttcacaaataaagcatttttttcactgcattctagttgtggtttgtccaaactcatcaatgtatcttatcatgtcagatctaggaacccctagtgatggagttggccactccctctctgcgcgctcgctcgctcactgaggccgggcgaccaaaggtcgcccgacgcccgggctttgcccgggcggcctcagtgagcgagcgagcgcgcag

SEQ ID NO: 674 - DNA, 4014 bp, synthetic construct
  source 1..4014: mol_type = other DNA
ctgcgcgctcgctcgctcactgaggccgcccgggcaaagcccgggcgtcgggcgacctttggtcgcccggcctcagtgagcgagcgagcgcgcagagagggagtggccaactccatcactaggggttcctagatctcttaggtcagtgaagagaagaacaaaaagcagcatattacagttagttgtcttcatcaatctttaaatatgttgtgtggtttttctctccctgtttccacagttgatatccaaatgacccagagccccagctccctgtcagcctctgtgggagacagagtgaccatcacatgcagagccagccagagcatcagcagctacctgaactggtaccagcagaagcctggcaaggcccccaagctgctgatctatgctgccagcagcctgcagtctggagtgccttccagattctctggctcaggcagtggcacagacttcaccctgacaatcagcagcctgcagcctgaagactttgccacctactactgccagcagagctacagcacaccacctatcacctttggccagggcaccagactggagatcaaagggggtgggggctctggggggggaggcagtggaggaggtggctctgaagtccagctggtggagtctggaggaggcctggtgcagcctggaggcagcctgaggctgtcctgtgcagcctctggcttcaccttcaacatctttgagatgaactgggttaggcaggcccctggcaagggcctggaatggatcagctacattagcagcagaggcaccacaacctactatgctgactctgtgaggggcagattcaccatcagcagagataatgccaagaacagcctgtacctgcagatgaacagcctcagagctgaggacacagctgtgtactactgtgccagagattatgaggccaccatcccctttgacttctggggccaaggcaccctggtgacagtgtcttctggaggtggaggctctggaggaggtggcagtgcccatcctggcagacctagagctgtgcccacacagtgtgatgtgcctccaaacagcagatttgactgtgcccctgacaaggccatcacacaagagcagtgtgaagccagaggctgctgttacatccctgccaagcaaggactgcaaggggctcagatgggacagccctggtgcttcttcccaccatcttaccccagctacaagctggaaaacctgagcagctctgagatgggctacactgctacactgaccagaaccacacctacattcttcccaaaggacatcctgacactgaggctggatgtgatgatggaaacagagaacaggctgcacttcaccatcaaggaccctgccaatagaagatatgaggtgcccctggaaacccctcatgtgcactctagagccccatctccactgtactctgtggaattttctgaggaaccctttggggtcatagtcagaaggcagctggatggcagagtgctgctgaacacaactgtggcccctctgttctttgctgatcagttcctgcagctgagcaccagcctgcctagccagtatatcacaggcctggcagagcacctgtctccactgatgctgagcacatcctggaccagaatcaccctgtggaacagagacctggctcccacacctggggccaacctgtatggctctcaccccttctatctggccctggaagatggtggttcagcccatggtgtctttctgctgaactccaatgccatggatgtggtgctgcagccctctcctgctctgtcttggagaagcactggtggcatcctggatgtgtacatctttctgggccctgagcctaagtctgtggtgcagcagtacctggatgttgtgggctaccccttcatgcctccttattggggcctgggcttccacctgtgcagatggggatacagcagcacagccatcaccagacaggttgtggaaaacatgaccagagcacacttcccactggatgtgcagtggaatgacctggactacatggacagcagaagggacttcaccttcaacaaggatggcttcagagacttccctgccatggtgcaagagctgcaccaaggtggtagaagatatatgatgattgtggacccagccatcagctcctctggaccagctggcagctacagaccctatgatgagggactgagaagaggggtgttcatcaccaatgagacaggccagcctctgattggcaaagtgtggccaggctccacagcctttccagatttcacaaaccccacagctctggcttggtgggaagatatggtggcagagttccatgatcaggtgccctttgatggcatgtggattgacatgaatgagcccagcaacttcatcaggggctctgaggatggatgccccaacaatgaactggaaaatcctccttatgtgcctggtgttgttggagggacactgcaggcagccacaatttgtgccagctctcaccagtttctgagcacccactacaacctgcacaatctgtatggcctgactgaggccattgccagccacagggctcttgtgaaggctagaggcaccagaccttttgtgatcagcaggtccacctttgctggccatggcagatatgctggccactggactggggatgtgtggtctagttgggagcagctggctagctctgtgcctgagatcctgcagttcaacctgctgggagtgccccttgttggagcagatgtgtgtggcttcctgggcaacacctcagaggaactgtgtgtcagatggactcagctgggagcattctaccctttcatgagaaaccacaacagcctgctgagcctgcctcaagagccttacagcttttctgagccagcacagcaggccatgagaaaggccctgactctgagatatgccctgctgcctcacctgtacaccctgttccatcaggctcatgtggctggggagactgtggctagacccctgttcctggaattccccaaggacagctccacctggacagtggatcatcagctgctgtggggagaagccctgctgattacacctgtgctgcaggctggcaaggctgaagtgacaggctacttccctcttggcacttggtatgacctgcagacagtgcctgtggaagctctgggatctctgcctccacctcctgctgctcctagagagcctgccattcactctgaaggccagtgggttaccctgcctgctccactggataccatcaatgtgcatctgagagcaggctacatcatccctctgcaaggccctggcctgaccaccacagaatctagacagcagccaatggcactggctgtggccctgaccaaaggtggagaagctagaggggagctgttctgggatgatggggagagcctggaagtgctggaaagaggggcctatacacaagtgatttttctggctaggaacaataccattgtgaatgagcttgtcagagtcacctctgaaggtgctggcctgcagctccagaaagtgacagtgcttggagtggccacagcaccccagcaagtgctgtctaatggggtgccagtgtccaacttcacatacagccctgataccaaggtcctggacatctgtgtgtccctgcttatgggagagcagttcctggtgtcttggtgctaataatcagccataccacatttgtagaggttttacttgctttaaaaaacctcccacacctccccctgaacctgaaacataaaatgaatgcaattgttgttgttaacttgtttattgcagcttataatggttacaaataaagcaatagcatcacaaatttcacaaataaagcatttttttcactgcattctagttgtggtttgtccaaactcatcaatgtatcttatcatgtcagatctaggaacccctagtgatggagttggccactccctctctgcgcgctcgctcgctcactgaggccgggcgaccaaaggtcgcccgacgcccgggctttgcccgggcggcctcagtgagcgagcgagcgcgcag

SEQ ID NO: 675 - DNA, 4020 bp, synthetic construct
  source 1..4020: mol_type = other DNA
ctgcgcgctcgctcgctcactgaggccgcccgggcaaagcccgggcgtcgggcgacctttggtcgcccggcctcagtgagcgagcgagcgcgcagagagggagtggccaactccatcactaggggttcctagatctcttaggtcagtgaagagaagaacaaaaagcagcatattacagttagttgtcttcatcaatctttaaatatgttgtgtggtttttctctccctgtttccacagttgacatccagatgacccagtctccatcctccctgtctgcatctgtaggagacagagtcaccatcacttgccgggcaagtcagagcattagcagctatttaaattggtatcagcagaaaccagggaaagcccctaagctcctgatctatgctgcatccagtttgcaaagtggggtcccgtcaaggttcagtggcagtggatctgggacagatttcactctcaccatcagcagtctgcaacctgaagattttgcaacttactactgtcaacagagttacagtacccctccgatcaccttcggccaagggacacgactggagattaaaggcggcggcggaagcggagggggaggatcaggaggaggcggatccgaagtgcagctggtggagtctgggggaggcttggttcagcctggcaggtccctgagactctcctgtgcagcctctggattcacctttgatgattatgccatgaactgggtccggcaagctccagggaagggcctggagtgggtctcaggtattagttggagtagtggtagcatggactatgcggactctgtgaagggccgattcaccatctccagagacaacgccaaaaactccctgtatctgcaaatgaacagtctgagaactgaggacacggccttatattactgtgcaaaagctagggaagttggagactactacggtatggacgtctggggccaagggaccacggtcaccgtctcctcaggaggtggtggaagtggaggtggtggaagtgcacaccccggccgtcccagagcagtgcccacacagtgcgacgtcccccccaacagccgcttcgattgcgcccctgacaaggccatcacccaggaacagtgcgaggcccgcggctgttgctacatccctgcaaagcaggggctgcagggagcccagatggggcagccctggtgcttcttcccacccagctaccccagctacaagctggagaacctgagctcctctgaaatgggctacacggccaccctgacccgtaccacccccaccttcttccccaaggacatcctgaccctgcggctggacgtgatgatggagactgagaaccgcctccacttcacgatcaaagatccagctaacaggcgctacgaggtgcccttggagaccccgcatgtccacagccgggcaccgtccccactctacagcgtggagttctccgaggagcccttcggggtgatcgtgcgccggcagctggacggccgcgtgctgctgaacacgacggtggcgcccctgttctttgcggaccagttccttcagctgtccacctcgctgccctcgcagtatatcacaggcctcgccgagcacctcagtcccctgatgctcagcaccagctggaccaggatcaccctgtggaaccgggaccttgcgcccacgcccggtgcgaacctctacgggtctcaccctttctacctggcgctggaggacggcgggtcggcacacggggtgttcctgctaaacagcaatgccatggatgtggtcctgcagccgagccctgcccttagctggaggtcgacaggtgggatcctggatgtctacatcttcctgggcccagagcccaagagcgtggtgcagcagtacctggacgttgtgggatacccgttcatgccgccatactggggcctgggcttccacctgtgccgctggggctactcctccaccgctatcacccgccaggtggtggagaacatgaccagggcccacttccccctggacgtccagtggaacgacctggactacatggactcccggagggacttcacgttcaacaaggatggcttccgggacttcccggccatggtgcaggagctgcaccagggcggccggcgctacatgatgatcgtggatcctgccatcagcagctcgggccctgccgggagctacaggccctacgacgagggtctgcggaggggggttttcatcaccaacgagaccggccagccgctgattgggaaggtatggcccgggtccactgccttccccgacttcaccaaccccacagccctggcctggtgggaggacatggtggctgagttccatgaccaggtgcccttcgacggcatgtggattgacatgaacgagccttccaacttcatcaggggctctgaggacggctgccccaacaatgagctggagaacccaccctacgtgcctggggtggttggggggaccctccaggcggccaccatctgtgcctccagccaccagtttctctccacacactacaacctgcacaacctctacggcctgaccgaagccatcgcctcccacagggcgctggtgaaggctcgggggacacgcccatttgtgatctcccgctcgacctttgctggccacggccgatacgccggccactggacgggggacgtgtggagctcctgggagcagctcgcctcctccgtgccagaaatcctgcagtttaacctgctgggggtgcctctggtcggggccgacgtctgcggcttcctgggcaacacctcagaggagctgtgtgtgcgctggacccagctgggggccttctaccccttcatgcggaaccacaacagcctgctcagtctgccccaggagccgtacagcttcagcgagccggcccagcaggccatgaggaaggccctcaccctgcgctacgcactcctcccccacctctacacactgttccaccaggcccacgtcgcgggggagaccgtggcccggcccctcttcctggagttccccaaggactctagcacctggactgtggaccaccagctcctgtggggggaggccctgctcatcaccccagtgctccaggccgggaaggccgaagtgactggctacttccccttgggcacatggtacgacctgcagacggtgccagtagaggcccttggcagcctcccacccccacctgcagctccccgtgagccagccatccacagcgaggggcagtgggtgacgctgccggcccccctggacaccatcaacgtccacctccgggctgggtacatcatccccctgcagggccctggcctcacaaccacagagtcccgccagcagcccatggccctggctgtggccctgaccaagggtggggaggcccgaggggagctgttctgggacgatggagagagcctggaagtgctggagcgaggggcctacacacaggtcatcttcctggccaggaataacacgatcgtgaatgagctggtacgtgtgaccagtgagggagctggcctgcagctgcagaaggtgactgtcctgggcgtggccacggcgccccagcaggtcctctccaacggtgtccctgtctccaacttcacctacagccccgacaccaaggtcctggacatctgtgtctcgctgttgatgggagagcagtttctcgtcagctggtgttaataatcagccataccacatttgtagaggttttacttgctttaaaaaacctcccacacctccccctgaacctgaaacataaaatgaatgcaattgttgttgttaacttgtttattgcagcttataatggttacaaataaagcaatagcatcacaaatttcacaaataaagcatttttttcactgcattctagttgtggtttgtccaaactcatcaatgtatcttatcatgtcagatctaggaacccctagtgatggagttggccactccctctctgcgcgctcgctcgctcactgaggccgggcgaccaaaggtcgcccgacgcccgggctttgcccgggcggcctcagtgagcgagcgagcgcgcag

SEQ ID NO: 676 - DNA, 4020 bp, synthetic construct
  source 1..4020: mol_type = other DNA
ctgcgcgctcgctcgctcactgaggccgcccgggcaaagcccgggcgtcgggcgacctttggtcgcccggcctcagtgagcgagcgagcgcgcagagagggagtggccaactccatcactaggggttcctagatctcttaggtcagtgaagagaagaacaaaaagcagcatattacagttagttgtcttcatcaatctttaaatatgttgtgtggtttttctctccctgtttccacagttgacatccagatgacacagagcccctctagcctgtctgcctctgtgggagacagagtgaccatcacctgtagagccagccagagcatcagcagctacctgaactggtatcagcagaagcctggcaaggcccctaaactgctgatctatgctgccagcagcctgcagtctggggtgccctctagattttctggcagtggctctggcacagacttcaccctgaccataagctccctgcagcctgaggactttgccacctactactgtcagcagagctacagcacccctcctatcacctttggccagggcaccagactggaaatcaaaggtggtggtggaagtggtggtggtggcagtggtggtggtggatctgaagtgcagctggtggaaagtggtggtggcctggttcagcctggcagatccctgagactgagctgtgcagcctctggctttacctttgatgactatgccatgaactgggtcagacaggccccaggcaaaggcctggaatgggtgtcaggcatctcttggtcctctggctccatggactatgctgactctgtgaagggcagattcaccatcagcagagacaatgccaagaacagcctgtacctgcagatgaactccctgagaacagaggacacagccctgtactactgtgccaaggccagagaagtgggagactactatggcatggatgtgtggggccagggaaccacagtgacagtcagtagtggtggtggtggcagtggtggtggtggttctgcccatcctggcagacctagagctgtgcccacacagtgtgatgtgcctccaaacagcagatttgactgtgcccctgacaaggccatcacacaagagcagtgtgaagccagaggctgctgttacatccctgccaagcaaggactgcaaggggctcagatgggacagccctggtgcttcttcccaccatcttaccccagctacaagctggaaaacctgagcagctctgagatgggctacactgctacactgaccagaaccacacctacattcttcccaaaggacatcctgacactgaggctggatgtgatgatggaaacagagaacaggctgcacttcaccatcaaggaccctgccaatagaagatatgaggtgcccctggaaacccctcatgtgcactctagagccccatctccactgtactctgtggaattttctgaggaaccctttggggtcatagtcagaaggcagctggatggcagagtgctgctgaacacaactgtggcccctctgttctttgctgatcagttcctgcagctgagcaccagcctgcctagccagtatatcacaggcctggcagagcacctgtctccactgatgctgagcacatcctggaccagaatcaccctgtggaacagagacctggctcccacacctggggccaacctgtatggctctcaccccttctatctggccctggaagatggtggttcagcccatggtgtctttctgctgaactccaatgccatggatgtggtgctgcagccctctcctgctctgtcttggagaagcactggtggcatcctggatgtgtacatctttctgggccctgagcctaagtctgtggtgcagcagtacctggatgttgtgggctaccccttcatgcctccttattggggcctgggcttccacctgtgcagatggggatacagcagcacagccatcaccagacaggttgtggaaaacatgaccagagcacacttcccactggatgtgcagtggaatgacctggactacatggacagcagaagggacttcaccttcaacaaggatggcttcagagacttccctgccatggtgcaagagctgcaccaaggtggtagaagatatatgatgattgtggacccagccatcagctcctctggaccagctggcagctacagaccctatgatgagggactgagaagaggggtgttcatcaccaatgagacaggccagcctctgattggcaaagtgtggccaggctccacagcctttccagatttcacaaaccccacagctctggcttggtgggaagatatggtggcagagttccatgatcaggtgccctttgatggcatgtggattgacatgaatgagcccagcaacttcatcaggggctctgaggatggatgccccaacaatgaactggaaaatcctccttatgtgcctggtgttgttggagggacactgcaggcagccacaatttgtgccagctctcaccagtttctgagcacccactacaacctgcacaatctgtatggcctgactgaggccattgccagccacagggctcttgtgaaggctagaggcaccagaccttttgtgatcagcaggtccacctttgctggccatggcagatatgctggccactggactggggatgtgtggtctagttgggagcagctggctagctctgtgcctgagatcctgcagttcaacctgctgggagtgccccttgttggagcagatgtgtgtggcttcctgggcaacacctcagaggaactgtgtgtcagatggactcagctgggagcattctaccctttcatgagaaaccacaacagcctgctgagcctgcctcaagagccttacagcttttctgagccagcacagcaggccatgagaaaggccctgactctgagatatgccctgctgcctcacctgtacaccctgttccatcaggctcatgtggctggggagactgtggctagacccctgttcctggaattccccaaggacagctccacctggacagtggatcatcagctgctgtggggagaagccctgctgattacacctgtgctgcaggctggcaaggctgaagtgacaggctacttccctcttggcacttggtatgacctgcagacagtgcctgtggaagctctgggatctctgcctccacctcctgctgctcctagagagcctgccattcactctgaaggccagtgggttaccctgcctgctccactggataccatcaatgtgcatctgagagcaggctacatcatccctctgcaaggccctggcctgaccaccacagaatctagacagcagccaatggcactggctgtggccctgaccaaaggtggagaagctagaggggagctgttctgggatgatggggagagcctggaagtgctggaaagaggggcctatacacaagtgatttttctggctaggaacaataccattgtgaatgagcttgtcagagtcacctctgaaggtgctggcctgcagctccagaaagtgacagtgcttggagtggccacagcaccccagcaagtgctgtctaatggggtgccagtgtccaacttcacatacagccctgataccaaggtcctggacatctgtgtgtccctgcttatgggagagcagttcctggtgtcttggtgctaataatcagccataccacatttgtagaggttttacttgctttaaaaaacctcccacacctccccctgaacctgaaacataaaatgaatgcaattgttgttgttaacttgtttattgcagcttataatggttacaaataaagcaatagcatcacaaatttcacaaataaagcatttttttcactgcattctagttgtggtttgtccaaactcatcaatgtatcttatcatgtcagatctaggaacccctagtgatggagttggccactccctctctgcgcgctcgctcgctcactgaggccgggcgaccaaaggtcgcccgacgcccgggctttgcccgggcggcctcagtgagcgagcgagcgcgcag

SEQ ID NO: 677 - DNA, 4020 bp, synthetic construct
  source 1..4020: mol_type = other DNA
ctgcgcgctcgctcgctcactgaggccgcccgggcaaagcccgggcgtcgggcgacctttggtcgcccggcctcagtgagcgagcgagcgcgcagagagggagtggccaactccatcactaggggttcctagatctcttaggtcagtgaagagaagaacaaaaagcagcatattacagttagttgtcttcatcaatctttaaatatgttgtgtggtttttctctccctgtttccacagttgatatccagatgacccagagccccagcagcctgtctgccagtgtgggggatagagtgaccatcacctgcagggccagccagagcatcagcagctacctcaactggtaccagcaaaagcctggcaaggcccccaaactgctgatttatgctgccagcagcctgcagtctggggtcccttccagattctctggctctggctctggcacagacttcaccctgaccatcagcagcctgcagccagaggactttgccacatactactgccagcagagctacagcaccccccctatcacctttggccagggcaccaggctggagatcaagggaggtgggggctcaggaggaggtggctctggaggaggaggctcagaggtgcagctggttgagagtggaggaggcctggtgcagcctggcagaagcctgagactgagctgtgctgcctctggcttcacctttgatgactatgccatgaactgggtgagacaggcccctggcaagggcctggaatgggtgtctggcatctcctggagctctggcagcatggactatgctgactctgtgaagggcaggttcaccatcagcagagacaatgccaagaacagcctgtacctgcagatgaacagcctgagaacagaagacacagccctgtactactgtgcaaaagccagagaagtgggagactactatggcatggatgtgtggggccaaggcaccacagtgacagtgagcagtggtggaggtggctcagggggaggaggcagtgcccatcctggcagacctagagctgtgcccacacagtgtgatgtgcctccaaacagcagatttgactgtgcccctgacaaggccatcacacaagagcagtgtgaagccagaggctgctgttacatccctgccaagcaaggactgcaaggggctcagatgggacagccctggtgcttcttcccaccatcttaccccagctacaagctggaaaacctgagcagctctgagatgggctacactgctacactgaccagaaccacacctacattcttcccaaaggacatcctgacactgaggctggatgtgatgatggaaacagagaacaggctgcacttcaccatcaaggaccctgccaatagaagatatgaggtgcccctggaaacccctcatgtgcactctagagccccatctccactgtactctgtggaattttctgaggaaccctttggggtcatagtcagaaggcagctggatggcagagtgctgctgaacacaactgtggcccctctgttctttgctgatcagttcctgcagctgagcaccagcctgcctagccagtatatcacaggcctggcagagcacctgtctccactgatgctgagcacatcctggaccagaatcaccctgtggaacagagacctggctcccacacctggggccaacctgtatggctctcaccccttctatctggccctggaagatggtggttcagcccatggtgtctttctgctgaactccaatgccatggatgtggtgctgcagccctctcctgctctgtcttggagaagcactggtggcatcctggatgtgtacatctttctgggccctgagcctaagtctgtggtgcagcagtacctggatgttgtgggctaccccttcatgcctccttattggggcctgggcttccacctgtgcagatggggatacagcagcacagccatcaccagacaggttgtggaaaacatgaccagagcacacttcccactggatgtgcagtggaatgacctggactacatggacagcagaagggacttcaccttcaacaaggatggcttcagagacttccctgccatggtgcaagagctgcaccaaggtggtagaagatatatgatgattgtggacccagccatcagctcctctggaccagctggcagctacagaccctatgatgagggactgagaagaggggtgttcatcaccaatgagacaggccagcctctgattggcaaagtgtggccaggctccacagcctttccagatttcacaaaccccacagctctggcttggtgggaagatatggtggcagagttccatgatcaggtgccctttgatggcatgtggattgacatgaatgagcccagcaacttcatcaggggctctgaggatggatgccccaacaatgaactggaaaatcctccttatgtgcctggtgttgttggagggacactgcaggcagccacaatttgtgccagctctcaccagtttctgagcacccactacaacctgcacaatctgtatggcctgactgaggccattgccagccacagggctcttgtgaaggctagaggcaccagaccttttgtgatcagcaggtccacctttgctggccatggcagatatgctggccactggactggggatgtgtggtctagttgggagcagctggctagctctgtgcctgagatcctgcagttcaacctgctgggagtgccccttgttggagcagatgtgtgtggcttcctgggcaacacctcagaggaactgtgtgtcagatggactcagctgggagcattctaccctttcatgagaaaccacaacagcctgctgagcctgcctcaagagccttacagcttttctgagccagcacagcaggccatgagaaaggccctgactctgagatatgccctgctgcctcacctgtacaccctgttccatcaggctcatgtggctggggagactgtggctagacccctgttcctggaattccccaaggacagctccacctggacagtggatcatcagctgctgtggggagaagccctgctgattacacctgtgctgcaggctggcaaggctgaagtgacaggctacttccctcttggcacttggtatgacctgcagacagtgcctgtggaagctctgggatctctgcctccacctcctgctgctcctagagagcctgccattcactctgaaggccagtgggttaccctgcctgctccactggataccatcaatgtgcatctgagagcaggctacatcatccctctgcaaggccctggcctgaccaccacagaatctagacagcagccaatggcactggctgtggccctgaccaaaggtggagaagctagaggggagctgttctgggatgatggggagagcctggaagtgctggaaagaggggcctatacacaagtgatttttctggctaggaacaataccattgtgaatgagcttgtcagagtcacctctgaaggtgctggcctgcagctccagaaagtgacagtgcttggagtggccacagcaccccagcaagtgctgtctaatggggtgccagtgtccaacttcacatacagccctgataccaaggtcctggacatctgtgtgtccctgcttatgggagagcagttcctggtgtcttggtgctaataatcagccataccacatttgtagaggttttacttgctttaaaaaacctcccacacctccccctgaacctgaaacataaaatgaatgcaattgttgttgttaacttgtttattgcagcttataatggttacaaataaagcaatagcatcacaaatttcacaaataaagcatttttttcactgcattctagttgtggtttgtccaaactcatcaatgtatcttatcatgtcagatctaggaacccctagtgatggagttggccactccctctctgcgcgctcgctcgctcactgaggccgggcgaccaaaggtcgcccgacgcccgggctttgcccgggcggcctcagtgagcgagcgagcgcgcag

SEQ ID NO: 678 - DNA, 4020 bp, synthetic construct
  source 1..4020: mol_type = other DNA
ctgcgcgctcgctcgctcactgaggccgcccgggcaaagcccgggcgtcgggcgacctttggtcgcccggcctcagtgagcgagcgagcgcgcagagagggagtggccaactccatcactaggggttcctagatctcttaggtcagtgaagagaagaacaaaaagcagcatattacagttagttgtcttcatcaatctttaaatatgttgtgtggtttttctctccctgtttccacagttgacatccagatgacccagagccccagctccctgtcagccagtgtgggtgacagagtgaccatcacctgcagagccagccagagcatcagcagctacctgaactggtaccagcagaaacctggcaaagcccccaagctgctgatttatgctgctagcagcctgcagagtggagtgcccagcagattctcaggcagtggctctggcacagacttcaccctgaccatctccagcctgcagccagaagactttgccacctactactgccagcagagctacagcacccctcctatcacctttggccagggcacaagactggagatcaagggaggaggaggctctggaggaggaggctctggagggggaggctctgaggtccaactggttgaatctggagggggcctggtgcaacctggcaggagcctgagactgagctgtgctgcctctggcttcacctttgatgactatgccatgaactgggtgagacaggcccctggcaagggcctggagtgggtgtctggcatcagctggagctctggcagcatggactatgcagattctgtgaagggcaggttcaccatcagcagagataatgccaagaacagcctgtacctgcagatgaacagcctcaggacagaggacacagccctgtactactgtgccaaggccagagaagtgggtgactactatggcatggatgtgtggggccagggcaccacagtgacagtgagctctgggggaggaggctcaggtgggggtggcagtgcccatcctggcagacctagagctgtgcccacacagtgtgatgtgcctccaaacagcagatttgactgtgcccctgacaaggccatcacacaagagcagtgtgaagccagaggctgctgttacatccctgccaagcaaggactgcaaggggctcagatgggacagccctggtgcttcttcccaccatcttaccccagctacaagctggaaaacctgagcagctctgagatgggctacactgctacactgaccagaaccacacctacattcttcccaaaggacatcctgacactgaggctggatgtgatgatggaaacagagaacaggctgcacttcaccatcaaggaccctgccaatagaagatatgaggtgcccctggaaacccctcatgtgcactctagagccccatctccactgtactctgtggaattttctgaggaaccctttggggtcatagtcagaaggcagctggatggcagagtgctgctgaacacaactgtggcccctctgttctttgctgatcagttcctgcagctgagcaccagcctgcctagccagtatatcacaggcctggcagagcacctgtctccactgatgctgagcacatcctggaccagaatcaccctgtggaacagagacctggctcccacacctggggccaacctgtatggctctcaccccttctatctggccctggaagatggtggttcagcccatggtgtctttctgctgaactccaatgccatggatgtggtgctgcagccctctcctgctctgtcttggagaagcactggtggcatcctggatgtgtacatctttctgggccctgagcctaagtctgtggtgcagcagtacctggatgttgtgggctaccccttcatgcctccttattggggcctgggcttccacctgtgcagatggggatacagcagcacagccatcaccagacaggttgtggaaaacatgaccagagcacacttcccactggatgtgcagtggaatgacctggactacatggacagcagaagggacttcaccttcaacaaggatggcttcagagacttccctgccatggtgcaagagctgcaccaaggtggtagaagatatatgatgattgtggacccagccatcagctcctctggaccagctggcagctacagaccctatgatgagggactgagaagaggggtgttcatcaccaatgagacaggccagcctctgattggcaaagtgtggccaggctccacagcctttccagatttcacaaaccccacagctctggcttggtgggaagatatggtggcagagttccatgatcaggtgccctttgatggcatgtggattgacatgaatgagcccagcaacttcatcaggggctctgaggatggatgccccaacaatgaactggaaaatcctccttatgtgcctggtgttgttggagggacactgcaggcagccacaatttgtgccagctctcaccagtttctgagcacccactacaacctgcacaatctgtatggcctgactgaggccattgccagccacagggctcttgtgaaggctagaggcaccagaccttttgtgatcagcaggtccacctttgctggccatggcagatatgctggccactggactggggatgtgtggtctagttgggagcagctggctagctctgtgcctgagatcctgcagttcaacctgctgggagtgccccttgttggagcagatgtgtgtggcttcctgggcaacacctcagaggaactgtgtgtcagatggactcagctgggagcattctaccctttcatgagaaaccacaacagcctgctgagcctgcctcaagagccttacagcttttctgagccagcacagcaggccatgagaaaggccctgactctgagatatgccctgctgcctcacctgtacaccctgttccatcaggctcatgtggctggggagactgtggctagacccctgttcctggaattccccaaggacagctccacctggacagtggatcatcagctgctgtggggagaagccctgctgattacacctgtgctgcaggctggcaaggctgaagtgacaggctacttccctcttggcacttggtatgacctgcagacagtgcctgtggaagctctgggatctctgcctccacctcctgctgctcctagagagcctgccattcactctgaaggccagtgggttaccctgcctgctccactggataccatcaatgtgcatctgagagcaggctacatcatccctctgcaaggccctggcctgaccaccacagaatctagacagcagccaatggcactggctgtggccctgaccaaaggtggagaagctagaggggagctgttctgggatgatggggagagcctggaagtgctggaaagaggggcctatacacaagtgatttttctggctaggaacaataccattgtgaatgagcttgtcagagtcacctctgaaggtgctggcctgcagctccagaaagtgacagtgcttggagtggccacagcaccccagcaagtgctgtctaatggggtgccagtgtccaacttcacatacagccctgataccaaggtcctggacatctgtgtgtccctgcttatgggagagcagttcctggtgtcttggtgctaataatcagccataccacatttgtagaggttttacttgctttaaaaaacctcccacacctccccctgaacctgaaacataaaatgaatgcaattgttgttgttaacttgtttattgcagcttataatggttacaaataaagcaatagcatcacaaatttcacaaataaagcatttttttcactgcattctagttgtggtttgtccaaactcatcaatgtatcttatcatgtcagatctaggaacccctagtgatggagttggccactccctctctgcgcgctcgctcgctcactgaggccgggcgaccaaaggtcgcccgacgcccgggctttgcccgggcggcctcagtgagcgagcgagcgcgcag

SEQ ID NO: 679 - DNA, 3993 bp, synthetic construct
  source 1..3993: mol_type = other DNA
ctgcgcgctcgctcgctcactgaggccgcccgggcaaagcccgggcgtcgggcgacctttggtcgcccggcctcagtgagcgagcgagcgcgcagagagggagtggccaactccatcactaggggttcctagatctcttaggtcagtgaagagaagaacaaaaagcagcatattacagttagttgtcttcatcaatctttaaatatgttgtgtggtttttctctccctgtttccacagttcaggtccagctgcaagagtctggccccaaggtggtcaagccctctgagacactgagcctgacctgcacagtgtctggtggcagcatcagcagctactactggaactggatcagacagagccctggcaaaggcctggaatggattggctacaccaagagaggctacacagactacaaccccagcctgagaagcagagtgaccatctctgaggacaccagcaagaaccagttcagcctgaggatcagctctgtgacagctgctgacacagcagtgtactactgtgcccagatgggctggggcagccatgcctttgatatgtggggccagggcacaatggtggctgtgtccagtgggggctcaggaggaggtggctcaggaggtggaggttcaggaggggagattgtgctgacccagtctcctggcacactgtctctgagccctggggaaagagccacactgagctgtagagccagccagtctgtgtcctctagctacctggcctggtatcagcagaagcctggacaggctcccagactgctgatctatggggcctcttctagagccacaggcatccctgacagattcagtggcagtggctctggcacagacttcaccctgaccatcagcagactggaacctgaggactttgctgtgtactattgccagcagtatggcagcagcccctggacatttggacagggcaccaaggtggaaatcaaaggtggtggtggctctgcccatcctggcagacctagagctgtgcccacacagtgtgatgtgcctccaaacagcagatttgactgtgcccctgacaaggccatcacacaagagcagtgtgaagccagaggctgctgttacatccctgccaagcaaggactgcaaggggctcagatgggacagccctggtgcttcttcccaccatcttaccccagctacaagctggaaaacctgagcagctctgagatgggctacactgctacactgaccagaaccacacctacattcttcccaaaggacatcctgacactgaggctggatgtgatgatggaaacagagaacaggctgcacttcaccatcaaggaccctgccaatagaagatatgaggtgcccctggaaacccctcatgtgcactctagagccccatctccactgtactctgtggaattttctgaggaaccctttggggtcatagtcagaaggcagctggatggcagagtgctgctgaacacaactgtggcccctctgttctttgctgatcagttcctgcagctgagcaccagcctgcctagccagtatatcacaggcctggcagagcacctgtctccactgatgctgagcacatcctggaccagaatcaccctgtggaacagagacctggctcccacacctggggccaacctgtatggctctcaccccttctatctggccctggaagatggtggttcagcccatggtgtctttctgctgaactccaatgccatggatgtggtgctgcagccctctcctgctctgtcttggagaagcactggtggcatcctggatgtgtacatctttctgggccctgagcctaagtctgtggtgcagcagtacctggatgttgtgggctaccccttcatgcctccttattggggcctgggcttccacctgtgcagatggggatacagcagcacagccatcaccagacaggttgtggaaaacatgaccagagcacacttcccactggatgtgcagtggaatgacctggactacatggacagcagaagggacttcaccttcaacaaggatggcttcagagacttccctgccatggtgcaagagctgcaccaaggtggtagaagatatatgatgattgtggacccagccatcagctcctctggaccagctggcagctacagaccctatgatgagggactgagaagaggggtgttcatcaccaatgagacaggccagcctctgattggcaaagtgtggccaggctccacagcctttccagatttcacaaaccccacagctctggcttggtgggaagatatggtggcagagttccatgatcaggtgccctttgatggcatgtggattgacatgaatgagcccagcaacttcatcaggggctctgaggatggatgccccaacaatgaactggaaaatcctccttatgtgcctggtgttgttggagggacactgcaggcagccacaatttgtgccagctctcaccagtttctgagcacccactacaacctgcacaatctgtatggcctgactgaggccattgccagccacagggctcttgtgaaggctagaggcaccagaccttttgtgatcagcaggtccacctttgctggccatggcagatatgctggccactggactggggatgtgtggtctagttgggagcagctggctagctctgtgcctgagatcctgcagttcaacctgctgggagtgccccttgttggagcagatgtgtgtggcttcctgggcaacacctcagaggaactgtgtgtcagatggactcagctgggagcattctaccctttcatgagaaaccacaacagcctgctgagcctgcctcaagagccttacagcttttctgagccagcacagcaggccatgagaaaggccctgactctgagatatgccctgctgcctcacctgtacaccctgttccatcaggctcatgtggctggggagactgtggctagacccctgttcctggaattccccaaggacagctccacctggacagtggatcatcagctgctgtggggagaagccctgctgattacacctgtgctgcaggctggcaaggctgaagtgacaggctacttccctcttggcacttggtatgacctgcagacagtgcctgtggaagctctgggatctctgcctccacctcctgctgctcctagagagcctgccattcactctgaaggccagtgggttaccctgcctgctccactggataccatcaatgtgcatctgagagcaggctacatcatccctctgcaaggccctggcctgaccaccacagaatctagacagcagccaatggcactggctgtggccctgaccaaaggtggagaagctagaggggagctgttctgggatgatggggagagcctggaagtgctggaaagaggggcctatacacaagtgatttttctggctaggaacaataccattgtgaatgagcttgtcagagtcacctctgaaggtgctggcctgcagctccagaaagtgacagtgcttggagtggccacagcaccccagcaagtgctgtctaatggggtgccagtgtccaacttcacatacagccctgataccaaggtcctggacatctgtgtgtccctgcttatgggagagcagttcctggtgtcttggtgctaataatcagccataccacatttgtagaggttttacttgctttaaaaaacctcccacacctccccctgaacctgaaacataaaatgaatgcaattgttgttgttaacttgtttattgcagcttataatggttacaaataaagcaatagcatcacaaatttcacaaataaagcatttttttcactgcattctagttgtggtttgtccaaactcatcaatgtatcttatcatgtcagatctaggaacccctagtgatggagttggccactccctctctgcgcgctcgctcgctcactgaggccgggcgaccaaaggtcgcccgacgcccgggctttgcccgggcggcctcagtgagcgagcgagcgcgcag

SEQ ID NO: 680 - protein, 121 aa, synthetic construct
EVQLVESGGGLVQPGGSLRLSCAASGFAFSSYAMTWVRQAPGKGLEWVSVISGTGGSTYYADSVKGRFTISRDNSKNTLYLQMNSLRAEDTAVYYCAKGGAARRMEYFQYWGQGTTVTVSS

SEQ ID NO: 681 - protein, 121 aa, synthetic construct
EVQLVESGGGLVQPGGSLRLSCAASGFTFNSYAMTWVRQAPGKGLEWVSFIGGSTGNTYYAGSVKGRFTISSDNSKKTLYLQMNSLRAEDTAVYYCAKGGAARRMEYFQHWGQGTTVTVSS

SEQ ID NO: 682 - protein, 122 aa, synthetic construct
EVQLVESGGGVVQPGRSLRLSCAASGFTFTTYGMHWVRQAPGKGLEWVAVIWYDGSNKYYGDSVKGRFTISRDNSKNTLYLQMNSLRVDDTAVYYCTRTHGYTRSSDGFDYWGQGTMVTVSS

SEQ ID NO: 683 - protein, 107 aa, synthetic construct
DIVMTQSPATLSLSPGERATLSCRASQSVSSYLAWYQQKPGQAPRLLIHDVSNRATGIPARFSGSGSGTDFTLTISSLEPEDFVVYYCQQRSDWPITFGQGTRLEIK

SEQ ID NO: 684 - protein, 107 aa, synthetic construct
DIQMTQSPSSLSASVGDRVTITCWASQGISSYLAWYQQKPGKAPKLLIYAASTLQSGVPSRFSGSGSGTEFTLTISSLQPEDFATYYCQQLNSYPLTFGGGTKVEIK

SEQ ID NO: 685 - protein, 120 aa, synthetic construct
QVQLVESGPALVKPSQTLTLTCTFSGFSLNTYGMFVSWIRQPPGKALEWLAHIHWDDDKYYSTSLKTRLTISKDTSKNQVVLTMTNMDPVDTATYYCARGHNNLNYIIHWGQGTLVTVSS

SEQ ID NO: 686 - protein, 107 aa, synthetic construct
DILMTQSPSSLSASVGDRVTITCRASQGIRNDLGWYQQKPGKAPKLLIYAASTLQSGVPSRFSGSGSGTDFTLTISSLQPEDFATYYCLQDYNYPFTFGPGTKVEIK

SEQ ID NO: 687 - protein, 116 aa, synthetic construct
QVQLVESGGGLVQPGGSLRLSCAVSGFIFSSYEMNWVRQAPGKGLEWVSYISSSGSTIFYADSVKGRFTISRDNAKNSLYLQMNSLRAEDTAVYYCVSGVVLFDVWGQGTMVTVSS

SEQ ID NO: 688 - protein, 107 aa, synthetic construct
DIVMTQSPATLSVSPGERATLSCRASQSVSSNFAWYQQKPGQAPRLLIYSASSRATGIPVRFSGSGSGTEFTLTISSLQSEDFAVYYCQQYNIWPRTFGQGTKVEIK

SEQ ID NO: 689 - protein, 125 aa, synthetic construct
QVQLVESGGGLVQPGGSLRLSCAASGFTFSNYWMTWVRQAPGKGLEWVANIKEDGSEKDYVDSVKGRFTISRDNAKNSLYLQMNSLRGEDTAVYYCARDGEQLVDYYYYYVMDVWGQGTTVTVSS

SEQ ID NO: 690 - protein, 107 aa, synthetic construct
DIQMTQSPSSVSASVGDRVTITCRASQGISSWLAWYQQKPGKAPKLLIYAASSLQSGVPSRFSGSGSGTDFTLTISSLQPEDFATYYCQKANSFPYTFGQGTKVEIK

SEQ ID NO: 691 - protein, 117 aa, synthetic construct
EVQLVESGGGVVQPGRSLRLSCAASGFTFSSYGMHWVRQAPGKGLEWVAVIWYDGSNKYYADSVKGRFTISRDISKNTLYLQMNSLRAEDTAVYYCAGQLDLFFDYWGQGTLVTVSS

SEQ ID NO: 692 - protein, 121 aa, synthetic construct
EVQLVQSGGGLVQPGGSLRLSCATSGFTFTSYDMKWVRQAPGLGLEWVSAISGSGGNTYYADSVKGRFTISRDNSRNTLYLQMNSLRAEDTAVYYCTRSHDFGAFDYFDYWGQGTMVTVSS

SEQ ID NO: 693 - protein, 107 aa, synthetic construct
DIQLTQSPSSLSASVGDRVTITCRASQGIRDHFGWYQQKPGKAPKRLIYAASSLHSGVPSRFSGSGSGTEFTLTISSLQPEDFATYYCLQYDTYPLTFGGGTKVEIK

SEQ ID NO: 694 - protein, 121 aa, synthetic construct
EVQLLESGGALVQPGGSLRLSCAASGFTFTSYAMHWVRQAPGKGLEWVSSIRGSGGGTYSADSVKGRFTISRDNSRDTLYLQMNSVRAEDTAVYYCARSHDYGAFDFFDYWGQGTTVTVSS

SEQ ID NO: 695 - protein, 107 aa, synthetic construct
DIQMTQSPSSLSASVGDRVTITCRASQGIRTDLGWYQQKPGKAPKRLIYAASSLQSGVPSRFSGSGSGTEFTLTISSLRPEDFATFYCLQYNSYPLTFGGGTKVDIK

SEQ ID NO: 696 - protein, 123 aa, synthetic construct
QVQLVESGPGLVKPSETLSLTCTVSGESISSNTYYWGWIRQPPGKGLEWIGSIDYSGTTNYNPSLKSRVTISVDTSRNHFSLRLRSVTAADTAVYYCAREWGNYGYYYGMDVWGQGTTVTVSS

SEQ ID NO: 697 - protein, 123 aa, synthetic construct
EVQLVESGGGLVKPGGSLRLSCAASGFTFSDYYMNWIRQAPGKGLEWVSYISSSGTTIYYADSVKGRFTISRDNAKKSLYLEMNSLRAEDTAVYYCAREGYGNDYYYYGIDVWGQGTTVTVSS

SEQ ID NO: 698 - protein, 112 aa, synthetic construct
DIQLTQSPLSLPVTPGEPASISCRSSQSLLHGNGYNYLTWYLQKPGQSPQLLIYLGSNRASGVPDRFSGSGSGTDFTLKISRVEAEDVGVYYCMQALQTPYTFGQGTKVEIK

SEQ ID NO: 699 - protein, 122 aa, synthetic construct
EVQLVESGGGVVQPGRSLRLSCAASGFTFSSFGMHWVRQAPGKGLEWVIFISYDGSDKYYADSVKGRFAISRDSSKNTLYLQMNSLRAEDTAVYYCAKENGILTDSYGMDVWGQGTTVTVSS

SEQ ID NO: 700 - protein, 124 aa, synthetic construct
EVQLVESGAEVKKPGASVKVSCKASGYTFTSYGISWVRQAPGQGLEWMGWISVYHGNTNYAQKFQGRVTMTTDTSTSTAYMELRSLRSDDTAVYYCAREGYYDFWSGYYPFDYWGQGTTVTVSS

SEQ ID NO: 701 - protein, 121 aa, synthetic construct
EVQLVESGGSVVRPGGSLRLSCEASGFTFDDYGMSWVRQDPGKGLEWVSGINWNGDRTNYADSVKGRFIISRDNAKNSVYLQMNSLRAEDSALYHCARDQGLGVAATLDYWGQGTMVTVSS

SEQ ID NO: 702 - protein, 123 aa, synthetic construct
EVQLVESGGGLVKPGGSLRLSCAASGFTFSVYYMNWIRQAPGKGLEWVSYISSSGSTIYYADSVKGRFTISRDNAKNSLYLQMNSLRAEDTAVYYCGREGYSGTYSYYGMDVWGQGTTVTVSS

SEQ ID NO: 703 - protein, 107 aa, synthetic construct
DIQLTQSPSSLSASVGDRVTITCRASQDISHYSAWYQQKPGKLPNLLIYAASTLQSGVPSRFSGSGSGTDFSLTTSSLQPEDVATYYCQKYNSVPLTFGGRTKVEIK

SEQ ID NO: 704 - protein, 22 aa, synthetic construct
LLNENSYVPREAGSQKDENLAL

SEQ ID NO: 705 - protein, 15 aa, synthetic construct
IYMDQTKFPIVNAEL

SEQ ID NO: 706 - protein, 5 aa, synthetic construct
TYKEL

SEQ ID NO: 707 - protein, 19 aa, synthetic construct
KRKLSEKLDSTDFTGTIKL

SEQ ID NO: 708 - protein, 20 aa, synthetic construct
YTLIEKTMQNVKHPVTGQFL

SEQ ID NO: 709 - protein, 17 aa, synthetic construct
LIERIPELNKVARAAAE

SEQ ID NO: 710 - protein, 19 aa, synthetic construct
LNENSYVPREAGSQKDENL

SEQ ID NO: 711 - protein, 9 aa, synthetic construct
GTKKDFEDL

SEQ ID NO: 712 - protein, 26 aa, synthetic construct
SVIIVDKNGRLVYLVENPGGYVAYSK

SEQ ID NO: 713 - protein, 19 aa, synthetic construct
LLNENSYVPREAGSQKDEN

SEQ ID NO: 714 - protein, 12 aa, synthetic construct
DQTKFPIVNAEL

SEQ ID NO: 715 - protein, 14 aa, synthetic construct
TYKELIERIPELNK

SEQ ID NO: 716 - protein, 24 aa, synthetic construct
SVIIVDKNGRLVYLVENPGGYVAY

SEQ ID NO: 717 - protein, 20 aa, synthetic construct
FGNMEGDCPSDWKTDSTCRM

SEQ ID NO: 718 - protein, 4 aa, synthetic construct
FEDL

SEQ ID NO: 719 - protein, 21 aa, synthetic construct
LVENPGGYVAYSKAATVTGKL

SEQ ID NO: 720 - protein, 17 aa, synthetic construct
IYMDQTKFPIVNAELSF

SEQ ID NO: 721 - protein, 9 aa, synthetic construct
ISRAAAEKL

SEQ ID NO: 722 - protein, 18 aa, synthetic construct
VTSESKNVKLTVSNVLKE

SEQ ID NO: 723 - protein, 16 aa, synthetic construct
FCEDTDYPYLGTTMDT

SEQ ID NO: 724 - protein, 952 aa, Homo sapiens
MGVRHPPCSHRLLAVCALVSLATAALLGHILLHDFLLVPRELSGSSPVLEETHPAHQQGASRPGPRDAQAHPGRPRAVPTQCDVPPNSRFDCAPDKAITQEQCEARGCCYIPAKQGLQGAQMGQPWCFFPPSYPSYKLENLSSSEMGYTATLTRTTPTFFPKDILTLRLDVMMETENRLHFTIKDPANRRYEVPLETPHVHSRAPSPLYSVEFSEEPFGVIVRRQLDGRVLLNTTVAPLFFADQFLQLSTSLPSQYITGLAEHLSPLMLSTSWTRITLWNRDLAPTPGANLYGSHPFYLALEDGGSAHGVFLLNSNAMDVVLQPSPALSWRSTGGILDVYIFLGPEPKSVVQQYLDVVGYPFMPPYWGLGFHLCRWGYSSTAITRQVVENMTRAHFPLDVQWNDLDYMDSRRDFTFNKDGFRDFPAMVQELHQGGRRYMMIVDPAISSSGPAGSYRPYDEGLRRGVFITNETGQPLIGKVWPGSTAFPDFTNPTALAWWEDMVAEFHDQVPFDGMWIDMNEPSNFIRGSEDGCPNNELENPPYVPGVVGGTLQAATICASSHQFLSTHYNLHNLYGLTEAIASHRALVKARGTRPFVISRSTFAGHGRYAGHWTGDVWSSWEQLASSVPEILQFNLLGVPLVGADVCGFLGNTSEELCVRWTQLGAFYPFMRNHNSLLSLPQEPYSFSEPAQQAMRKALTLRYALLPHLYTLFHQAHVAGETVARPLFLEFPKDSSTWTVDHQLLWGEALLITPVLQAGKAEVTGYFPLGTWYDLQTVPVEALGSLPPPPAAPREPAIHSEGQWVTLPAPLDTINVHLRAGYIIPLQGPGLTTTESRQQPMALAVALTKGGEARGELFWDDGESLEVLERGAYTQVIFLARNNTIVNELVRVTSEGAGLQLQKVTVLGVATAPQQVLSNGVPVSNFTYSPDTKVLDICVSLLMGEQFLVSWC

SEQ ID NO: 725 - DNA, 3751 bp, Homo sapiens
  source 1..3751: mol_type = other DNA
cgaccccggagtctccgcgggcggccagggcgcgcgtgcgcggaggtgagccgggccggggctgcggggcttccctgagcgcgggccgggtcggtggggcggtcggctgcccgcgcggcctctcagttgggaaagctgaggttgtcgccggggccgcgggtggaggtcggggatgaggcagcaggtaggacagtgacctcggtgacgcgaaggaccccggccacctctaggttctcctcgtccgcccgttgttcagcgagggaggctctgcgcgtgccgcagctgacggggaaactgaggcacggagcgggcctgtaggagctgtccaggccatctccaaccatgggagtgaggcacccgccctgctcccaccggctcctggccgtctgcgccctcgtgtccttggcaaccgctgcactcctggggcacatcctactccatgatttcctgctggttccccgagagctgagtggctcctccccagtcctggaggagactcacccagctcaccagcagggagccagcagaccagggccccgggatgcccaggcacaccccggccgtcccagagcagtgcccacacagtgcgacgtcccccccaacagccgcttcgattgcgcccctgacaaggccatcacccaggaacagtgcgaggcccgcggctgttgctacatccctgcaaagcaggggctgcagggagcccagatggggcagccctggtgcttcttcccacccagctaccccagctacaagctggagaacctgagctcctctgaaatgggctacacggccaccctgacccgtaccacccccaccttcttccccaaggacatcctgaccctgcggctggacgtgatgatggagactgagaaccgcctccacttcacgatcaaagatccagctaacaggcgctacgaggtgcccttggagaccccgcatgtccacagccgggcaccgtccccactctacagcgtggagttctccgaggagcccttcggggtgatcgtgcgccggcagctggacggccgcgtgctgctgaacacgacggtggcgcccctgttctttgcggaccagttccttcagctgtccacctcgctgccctcgcagtatatcacaggcctcgccgagcacctcagtcccctgatgctcagcaccagctggaccaggatcaccctgtggaaccgggaccttgcgcccacgcccggtgcgaacctctacgggtctcaccctttctacctggcgctggaggacggcgggtcggcacacggggtgttcctgctaaacagcaatgccatggatgtggtcctgcagccgagccctgcccttagctggaggtcgacaggtgggatcctggatgtctacatcttcctgggcccagagcccaagagcgtggtgcagcagtacctggacgttgtgggatacccgttcatgccgccatactggggcctgggcttccacctgtgccgctggggctactcctccaccgctatcacccgccaggtggtggagaacatgaccagggcccacttccccctggacgtccagtggaacgacctggactacatggactcccggagggacttcacgttcaacaaggatggcttccgggacttcccggccatggtgcaggagctgcaccagggcggccggcgctacatgatgatcgtggatcctgccatcagcagctcgggccctgccgggagctacaggccctacgacgagggtctgcggaggggggttttcatcaccaacgagaccggccagccgctgattgggaaggtatggcccgggtccactgccttccccgacttcaccaaccccacagccctggcctggtgggaggacatggtggctgagttccatgaccaggtgcccttcgacggcatgtggattgacatgaacgagccttccaacttcatcaggggctctgaggacggctgccccaacaatgagctggagaacccaccctacgtgcctggggtggttggggggaccctccaggcggccaccatctgtgcctccagccaccagtttctctccacacactacaacctgcacaacctctacggcctgaccgaagccatcgcctcccacagggcgctggtgaaggctcgggggacacgcccatttgtgatctcccgctcgacctttgctggccacggccgatacgccggccactggacgggggacgtgtggagctcctgggagcagctcgcctcctccgtgccagaaatcctgcagtttaacctgctgggggtgcctctggtcggggccgacgtctgcggcttcctgggcaacacctcagaggagctgtgtgtgcgctggacccagctgggggccttctaccccttcatgcggaaccacaacagcctgctcagtctgccccaggagccgtacagcttcagcgagccggcccagcaggccatgaggaaggccctcaccctgcgctacgcactcctcccccacctctacacactgttccaccaggcccacgtcgcgggggagaccgtggcccggcccctcttcctggagttccccaaggactctagcacctggactgtggaccaccagctcctgtggggggaggccctgctcatcaccccagtgctccaggccgggaaggccgaagtgactggctacttccccttgggcacatggtacgacctgcagacggtgccagtagaggcccttggcagcctcccacccccacctgcagctccccgtgagccagccatccacagcgaggggcagtgggtgacgctgccggcccccctggacaccatcaacgtccacctccgggctgggtacatcatccccctgcagggccctggcctcacaaccacagagtcccgccagcagcccatggccctggctgtggccctgaccaagggtggggaggcccgaggggagctgttctgggacgatggagagagcctggaagtgctggagcgaggggcctacacacaggtcatcttcctggccaggaataacacgatcgtgaatgagctggtacgtgtgaccagtgagggagctggcctgcagctgcagaaggtgactgtcctgggcgtggccacggcgccccagcaggtcctctccaacggtgtccctgtctccaacttcacctacagccccgacaccaaggtcctggacatctgtgtctcgctgttgatgggagagcagtttctcgtcagctggtgttagccgggcggagtgtgttagtctctccagagggaggctggttccccagggaagcagagcctgtgtgcgggcagcagctgtgtgcgggcctgggggttgcatgtgtcacctggagctgggcactaaccattccaagccgccgcatcgcttgtttccacctcctgggccggggctctggcccccaacgtgtctaggagagctttctccctagatcgcactgtgggccggggccctggagggctgctctgtgttaataagattgtaaggtttgccctcctcacctgttgccggcatgcgggtagtattagccacccccctccatctgttcccagcaccggagaagggggtgctcaggtggaggtgtggggtatgcacctgagctcctgcttcgcgcctgctgctctgccccaacgcgaccgctgcccggctgcccagagggctggatgcctgccggtccccgagcaagcctgggaactcaggaaaattcacaggacttgggagattctaaatcttaagtgcaattatttttaataaaaggggcatttggaatcag

SEQ ID NO: 726 - DNA, 2859 bp, Homo sapiens
  source 1..2859: mol_type = other DNA
atgggagtgaggcacccgccctgctcccaccggctcctggccgtctgcgccctcgtgtccttggcaaccgctgcactcctggggcacatcctactccatgatttcctgctggttccccgagagctgagtggctcctccccagtcctggaggagactcacccagctcaccagcagggagccagcagaccagggccccgggatgcccaggcacaccccggccgtcccagagcagtgcccacacagtgcgacgtcccccccaacagccgcttcgattgcgcccctgacaaggccatcacccaggaacagtgcgaggcccgcggctgttgctacatccctgcaaagcaggggctgcagggagcccagatggggcagccctggtgcttcttcccacccagctaccccagctacaagctggagaacctgagctcctctgaaatgggctacacggccaccctgacccgtaccacccccaccttcttccccaaggacatcctgaccctgcggctggacgtgatgatggagactgagaaccgcctccacttcacgatcaaagatccagctaacaggcgctacgaggtgcccttggagaccccgcatgtccacagccgggcaccgtccccactctacagcgtggagttctccgaggagcccttcggggtgatcgtgcgccggcagctggacggccgcgtgctgctgaacacgacggtggcgcccctgttctttgcggaccagttccttcagctgtccacctcgctgccctcgcagtatatcacaggcctcgccgagcacctcagtcccctgatgctcagcaccagctggaccaggatcaccctgtggaaccgggaccttgcgcccacgcccggtgcgaacctctacgggtctcaccctttctacctggcgctggaggacggcgggtcggcacacggggtgttcctgctaaacagcaatgccatggatgtggtcctgcagccgagccctgcccttagctggaggtcgacaggtgggatcctggatgtctacatcttcctgggcccagagcccaagagcgtggtgcagcagtacctggacgttgtgggatacccgttcatgccgccatactggggcctgggcttccacctgtgccgctggggctactcctccaccgctatcacccgccaggtggtggagaacatgaccagggcccacttccccctggacgtccagtggaacgacctggactacatggactcccggagggacttcacgttcaacaaggatggcttccgggacttcccggccatggtgcaggagctgcaccagggcggccggcgctacatgatgatcgtggatcctgccatcagcagctcgggccctgccgggagctacaggccctacgacgagggtctgcggaggggggttttcatcaccaacgagaccggccagccgctgattgggaaggtatggcccgggtccactgccttccccgacttcaccaaccccacagccctggcctggtgggaggacatggtggctgagttccatgaccaggtgcccttcgacggcatgtggattgacatgaacgagccttccaacttcatcaggggctctgaggacggctgccccaacaatgagctggagaacccaccctacgtgcctggggtggttggggggaccctccaggcggccaccatctgtgcctccagccaccagtttctctccacacactacaacctgcacaacctctacggcctgaccgaagccatcgcctcccacagggcgctggtgaaggctcgggggacacgcccatttgtgatctcccgctcgacctttgctggccacggccgatacgccggccactggacgggggacgtgtggagctcctgggagcagctcgcctcctccgtgccagaaatcctgcagtttaacctgctgggggtgcctctggtcggggccgacgtctgcggcttcctgggcaacacctcagaggagctgtgtgtgcgctggacccagctgggggccttctaccccttcatgcggaaccacaacagcctgctcagtctgccccaggagccgtacagcttcagcgagccggcccagcaggccatgaggaaggccctcaccctgcgctacgcactcctcccccacctctacacactgttccaccaggcccacgtcgcgggggagaccgtggcccggcccctcttcctggagttccccaaggactctagcacctggactgtggaccaccagctcctgtggggggaggccctgctcatcaccccagtgctccaggccgggaaggccgaagtgactggctacttccccttgggcacatggtacgacctgcagacggtgccagtagaggcccttggcagcctcccacccccacctgcagctccccgtgagccagccatccacagcgaggggcagtgggtgacgctgccggcccccctggacaccatcaacgtccacctccgggctgggtacatcatccccctgcagggccctggcctcacaaccacagagtcccgccagcagcccatggccctggctgtggccctgaccaagggtggggaggcccgaggggagctgttctgggacgatggagagagcctggaagtgctggagcgaggggcctacacacaggtcatcttcctggccaggaataacacgatcgtgaatgagctggtacgtgtgaccagtgagggagctggcctgcagctgcagaaggtgactgtcctgggcgtggccacggcgccccagcaggtcctctccaacggtgtccctgtctccaacttcacctacagccccgacaccaaggtcctggacatctgtgtctcgctgttgatgggagagcagtttctcgtcagctggtgttag

SEQ ID NO: 727 - protein, 883 aa, Homo sapiens
AHPGRPRAVPTQCDVPPNSRFDCAPDKAITQEQCEARGCCYIPAKQGLQGAQMGQPWCFFPPSYPSYKLENLSSSEMGYTATLTRTTPTFFPKDILTLRLDVMMETENRLHFTIKDPANRRYEVPLETPHVHSRAPSPLYSVEFSEEPFGVIVRRQLDGRVLLNTTVAPLFFADQFLQLSTSLPSQYITGLAEHLSPLMLSTSWTRITLWNRDLAPTPGANLYGSHPFYLALEDGGSAHGVFLLNSNAMDVVLQPSPALSWRSTGGILDVYIFLGPEPKSVVQQYLDVVGYPFMPPYWGLGFHLCRWGYSSTAITRQVVENMTRAHFPLDVQWNDLDYMDSRRDFTFNKDGFRDFPAMVQELHQGGRRYMMIVDPAISSSGPAGSYRPYDEGLRRGVFITNETGQPLIGKVWPGSTAFPDFTNPTALAWWEDMVAEFHDQVPFDGMWIDMNEPSNFIRGSEDGCPNNELENPPYVPGVVGGTLQAATICASSHQFLSTHYNLHNLYGLTEAIASHRALVKARGTRPFVISRSTFAGHGRYAGHWTGDVWSSWEQLASSVPEILQFNLLGVPLVGADVCGFLGNTSEELCVRWTQLGAFYPFMRNHNSLLSLPQEPYSFSEPAQQAMRKALTLRYALLPHLYTLFHQAHVAGETVARPLFLEFPKDSSTWTVDHQLLWGEALLITPVLQAGKAEVTGYFPLGTWYDLQTVPVEALGSLPPPPAAPREPAIHSEGQWVTLPAPLDTINVHLRAGYIIPLQGPGLTTTESRQQPMALAVALTKGGEARGELFWDDGESLEVLERGAYTQVIFLARNNTIVNELVRVTSEGAGLQLQKVTVLGVATAPQQVLSNGVPVSNFTYSPDTKVLDICVSLLMGEQFLVSWC

SEQ ID NO: 728 - DNA, 2649 bp, Homo sapiens; identical to SEQ ID NO: 648
  source 1..2649: mol_type = other DNA

SEQ ID NO: 729 - DNA, 2649 bp, synthetic construct; identical to SEQ ID NO: 649
  source 1..2649: mol_type = other DNA

SEQ ID NO: 730 - protein, 240 aa, synthetic construct
QVQLQESGPKVVKPSETLSLTCTVSGGSISSYYWNWIRQSPGKGLEWIGYTKRGYTDYNPSLRSRVTISEDTSKNQFSLRISSVTAADTAVYYCAQMGWGSHAFDMWGQGTMVAVSSGGSGGGGSGGGGSGGEIVLTQSPGTLSLSPGERATLSCRASQSVSSSYLAWYQQKPGQAPRLLIYGASSRATGIPDRFSGSGSGTDFTLTISRLEPEDFAVYYCQQYGSSPWTFGQGTKVEIK

SEQ ID NO: 731 - DNA, 720 bp, synthetic construct
  source 1..720: mol_type = other DNA
caggtgcaactacaggagtcgggcccaaaggtggtgaagccttcggagaccctgtccctcacctgcactgtctctggtggctccatcagtagttactactggaattggatccgccagtccccagggaagggactggagtggattggatataccaaaagagggtataccgactacaacccctccctcaggagtcgcgtcactatatcagaagacacgtccaagaaccagttctccctgaggatcagctctgtgaccgccgcagacacggccgtatattactgtgcacaaatggggtggggatcccatgcttttgacatgtggggccaagggacaatggtcgccgtctcttcaggaggaagtggtggaggcgggtcaggaggtggcgggagcggcggtgaaatagttttgacacagagtcccggcacactgtcactctctcccggggaaagagccaccttgtcatgtagagcaagtcagtcagtctctagctcttatctcgcctggtaccagcagaagccgggacaggcccctagactgctgatctacggggcaagttccagggccaccggaatccccgaccggttcagtggaagcggaagcggaaccgattttactttgacgatttctagactggagccagaggatttcgccgtttactattgtcaacagtacggaagcagcccgtggacgtttggccagggcacgaaggtagaaatcaag

SEQ ID NO: 732 - DNA, 720 bp, synthetic construct
  source 1..720: mol_type = other DNA
caggtccagctgcaagagtctggccccaaggtggtcaagccctctgagacactgagcctgacctgcacagtgtctggtggcagcatcagcagctactactggaactggatcagacagagccctggcaaaggcctggaatggattggctacaccaagagaggctacacagactacaaccccagcctgagaagcagagtgaccatctctgaggacaccagcaagaaccagttcagcctgaggatcagctctgtgacagctgctgacacagcagtgtactactgtgcccagatgggctggggcagccatgcctttgatatgtggggccagggcacaatggtggctgtgtccagtgggggctcaggaggaggtggctcaggaggtggaggttcaggaggggagattgtgctgacccagtctcctggcacactgtctctgagccctggggaaagagccacactgagctgtagagccagccagtctgtgtcctctagctacctggcctggtatcagcagaagcctggacaggctcccagactgctgatctatggggcctcttctagagccacaggcatccctgacagattcagtggcagtggctctggcacagacttcaccctgaccatcagcagactggaacctgaggactttgctgtgtactattgccagcagtatggcagcagcccctggacatttggacagggcaccaaggtggaaatcaaa

SEQ ID NO: 733 - protein, 1128 aa, synthetic construct
QVQLQESGPKVVKPSETLSLTCTVSGGSISSYYWNWIRQSPGKGLEWIGYTKRGYTDYNPSLRSRVTISEDTSKNQFSLRISSVTAADTAVYYCAQMGWGSHAFDMWGQGTMVAVSSGGSGGGGSGGGGSGGEIVLTQSPGTLSLSPGERATLSCRASQSVSSSYLAWYQQKPGQAPRLLIYGASSRATGIPDRFSGSGSGTDFTLTISRLEPEDFAVYYCQQYGSSPWTFGQGTKVEIKGGGGSAHPGRPRAVPTQCDVPPNSRFDCAPDKAITQEQCEARGCCYIPAKQGLQGAQMGQPWCFFPPSYPSYKLENLSSSEMGYTATLTRTTPTFFPKDILTLRLDVMMETENRLHFTIKDPANRRYEVPLETPHVHSRAPSPLYSVEFSEEPFGVIVRRQLDGRVLLNTTVAPLFFADQFLQLSTSLPSQYITGLAEHLSPLMLSTSWTRITLWNRDLAPTPGANLYGSHPFYLALEDGGSAHGVFLLNSNAMDVVLQPSPALSWRSTGGILDVYIFLGPEPKSVVQQYLDVVGYPFMPPYWGLGFHLCRWGYSSTAITRQVVENMTRAHFPLDVQWNDLDYMDSRRDFTFNKDGFRDFPAMVQELHQGGRRYMMIVDPAISSSGPAGSYRPYDEGLRRGVFITNETGQPLIGKVWPGSTAFPDFTNPTALAWWEDMVAEFHDQVPFDGMWIDMNEPSNFIRGSEDGCPNNELENPPYVPGVVGGTLQAATICASSHQFLSTHYNLHNLYGLTEAIASHRALVKARGTRPFVISRSTFAGHGRYAGHWTGDVWSSWEQLASSVPEILQFNLLGVPLVGADVCGFLGNTSEELCVRWTQLGAFYPFMRNHNSLLSLPQEPYSFSEPAQQAMRKALTLRYALLPHLYTLFHQAHVAGETVARPLFLEFPKDSSTWTVDHQLLWGEALLITPVLQAGKAEVTGYFPLGTWYDLQTVPVEALGSLPPPPAAPREPAIHSEGQWVTLPAPLDTINVHLRAGYIIPLQGPGLTTTESRQQPMALAVALTKGGEARGELFWDDGESLEVLERGAYTQVIFLARNNTIVNELVRVTSEGAGLQLQKVTVLGVATAPQQVLSNGVPVSNFTYSPDTKVLDICVSLLMGEQFLVSWC

SEQ ID NO: 734 - DNA, 3384 bp, synthetic construct
  source 1..3384: mol_type = other DNA
caggtgcaactacaggagtcgggcccaaaggtggtgaagccttcggagaccctgtccctcacctgcactgtctctggtggctccatcagtagttactactggaattggatccgccagtccccagggaagggactggagtggattggatataccaaaagagggtataccgactacaacccctccctcaggagtcgcgtcactatatcagaagacacgtccaagaaccagttctccctgaggatcagctctgtgaccgccgcagacacggccgtatattactgtgcacaaatggggtggggatcccatgcttttgacatgtggggccaagggacaatggtcgccgtctcttcaggaggaagtggtggaggcgggtcaggaggtggcgggagcggcggtgaaatagttttgacacagagtcccggcacactgtcactctctcccggggaaagagccaccttgtcatgtagagcaagtcagtcagtctctagctcttatctcgcctggtaccagcagaagccgggacaggcccctagactgctgatctacggggcaagttccagggccaccggaatccccgaccggttcagtggaagcggaagcggaaccgattttactttgacgatttctagactggagccagaggatttcgccgtttactattgtcaacagtacggaagcagcccgtggacgtttggccagggcacgaaggtagaaatcaagggtggtggcggttcagcacaccccggccgtcccagagcagtgcccacacagtgcgacgtcccccccaacagccgcttcgattgcgcccctgacaaggccatcacccaggaacagtgcgaggcccgcggctgttgctacatccctgcaaagcaggggctgcagggagcccagatggggcagccctggtgcttcttcccacccagctaccccagctacaagctggagaacctgagctcctctgaaatgggctacacggccaccctgacccgtaccacccccaccttcttccccaaggacatcctgaccctgcggctggacgtgatgatggagactgagaaccgcctccacttcacgatcaaagatccagctaacaggcgctacgaggtgcccttggagaccccgcatgtccacagccgggcaccgtccccactctacagcgtggagttctccgaggagcccttcggggtgatcgtgcgccggcagctggacggccgcgtgctgctgaacacgacggtggcgcccctgttctttgcggaccagttccttcagctgtccacctcgctgccctcgcagtatatcacaggcctcgccgagcacctcagtcccctgatgctcagcaccagctggaccaggatcaccctgtggaaccgggaccttgcgcccacgcccggtgcgaacctctacgggtctcaccctttctacctggcgctggaggacggcgggtcggcacacggggtgttcctgctaaacagcaatgccatggatgtggtcctgcagccgagccctgcccttagctggaggtcgacaggtgggatcctggatgtctacatcttcctgggcccagagcccaagagcgtggtgcagcagtacctggacgttgtgggatacccgttcatgccgccatactggggcctgggcttccacctgtgccgctggggctactcctccaccgctatcacccgccaggtggtggagaacatgaccagggcccacttccccctggacgtccagtggaacgacctggactacatggactcccggagggacttcacgttcaacaaggatggcttccgggacttcccggccatggtgcaggagctgcaccagggcggccggcgctacatgatgatcgtggatcctgccatcagcagctcgggccctgccgggagctacaggccctacgacgagggtctgcggaggggggttttcatcaccaacgagaccggccagccgctgattgggaaggtatggcccgggtccactgccttccccgacttcaccaaccccacagccctggcctggtgggaggacatggtggctgagttccatgaccaggtgcccttcgacggcatgtggattgacatgaacgagccttccaacttcatcaggggctctgaggacggctgccccaacaatgagctggagaacccaccctacgtgcctggggtggttggggggaccctccaggcggccaccatctgtgcctccagccaccagtttctctccacacactacaacctgcacaacctctacggcctgaccgaagccatcgcctcccacagggcgctggtgaaggctcgggggacacgcccatttgtgatctcccgctcgacctttgctggccacggccgatacgccggccactggacgggggacgtgtggagctcctgggagcagctcgcctcctccgtgccagaaatcctgcagtttaacctgctgggggtgcctctggtcggggccgacgtctgcggcttcctgggcaacacctcagaggagctgtgtgtgcgctggacccagctgggggccttctaccccttcatgcggaaccacaacagcctgctcagtctgccccaggagccgtacagcttcagcgagccggcccagcaggccatgaggaaggccctcaccctgcgctacgcactcctcccccacctctacacactgttccaccaggcccacgtcgcgggggagaccgtggcccggcccctcttcctggagttccccaaggactctagcacctggactgtggaccaccagctcctgtggggggaggccctgctcatcaccccagtgctccaggccgggaaggccgaagtgactggctacttccccttgggcacatggtacgacctgcagacggtgccagtagaggcccttggcagcctcccacccccacctgcagctccccgtgagccagccatccacagcgaggggcagtgggtgacgctgccggcccccctggacaccatcaacgtccacctccgggctgggtacatcatccccctgcagggccctggcctcacaaccacagagtcccgccagcagcccatggccctggctgtggccctgaccaagggtggggaggcccgaggggagctgttctgggacgatggagagagcctggaagtgctggagcgaggggcctacacacaggtcatcttcctggccaggaataacacgatcgtgaatgagctggtacgtgtgaccagtgagggagctggcctgcagctgcagaaggtgactgtcctgggcgtggccacggcgccccagcaggtcctctccaacggtgtccctgtctccaacttcacctacagccccgacaccaaggtcctggacatctgtgtctcgctgttgatgggagagcagtttctcgtcagctggtgt

SEQ ID NO: 735 - DNA, 3384 bp, synthetic construct
  source 1..3384: mol_type = other DNA
caggtgcaactacaggagtctggcccaaaagtggtgaaaccttctgagacccttagtctcacctgcactgtctctggtggctccataagtagttattattggaattggatcagacagtccccagggaagggactggagtggattggatataccaaaagaggctatacagattacaatccctccctcaggagtagagtcactatatcagaagacacatccaaaaatcagttcagtctgaggatcagctctgtgacagctgcagacacagcagtatattactgtgcacaaatgggttggggatcccatgcttttgatatgtggggccaagggacaatggttgcagtatcttcaggaggaagtggtggaggagggtcaggaggtggaggatctggtggtgaaatagttttgacacagagtccaggcacactgtcactctctccaggggaaagagccaccttgtcatgtagagcaagtcagtcagtctctagctcttatctggcctggtaccagcagaagccaggacaggctcctagactcctgatttatggggcaagttccagggctacaggaatcccagatagatttagtggatctggatctggaactgattttactttgacaatttctagactggagccagaggattttgctgtttattattgtcaacagtatggatctagcccatggacatttggacagggcactaaagtagaaataaagggtggtggaggttcagcacacccaggcagacctagagcagtgcccacacaatgtgatgtcccccccaactcaagatttgattgtgcccctgacaaggccatcacccaagaacagtgtgaggccagaggctgttgctatatccctgcaaagcaggggttacagggagcccagatggggcagccatggtgcttcttcccacccagctacccttcttacaaactggaaaacctgagctcctctgaaatgggctacacagccacactgaccagaaccacccccaccttctttcccaaagatatcctgaccttaagactggatgtgatgatggaaactgaaaatagattacactttacaattaaagatccagctaacaggagatatgaagtgcccttggagaccccacatgttcattcaagagcacctagcccactctactctgtggagttctcagaagagccatttggggtgattgtgagaagacaattggatggaagagtgctgctgaatacaacagtggctccccttttttttgcagaccaatttcttcagctgtctaccagtctgcccagccagtatatcacaggcctggctgaacatctcagtcccttgatgctcagcaccagctggaccaggattaccttatggaatagagaccttgccccaactccaggtgccaacctctatgggtctcaccctttttacctggcccttgaggatggagggtctgcacatggggtgtttcttctaaacagcaatgcaatggatgtggtcctacagccatctcctgcccttagctggagatccacaggtgggatcctagatgtctatattttcctgggaccagagcctaagtcagtggtgcagcagtacctggatgttgtgggatatccattcatgcctccatactggggcctgggcttccatctgtgcagatggggatattcctccacagctatcacaagacaagtggtggagaatatgaccagggcccacttccccctggatgtccagtggaatgaccttgactacatggactccagaagggatttcacatttaacaaggatggcttcagagacttccctgccatggtgcaggaactgcaccaaggaggcagaagatacatgatgatagtggatcctgccatcagtagctctggccctgctgggagctatagaccctatgatgagggtctgagaaggggggttttcatcacaaatgagactggccaacctctgattgggaaggtatggccagggtccactgctttcccagacttcactaacccaacagccctggcctggtgggaggacatggtagctgaattccatgaccaggtgccttttgatggcatgtggattgacatgaatgaaccttccaacttcatcaggggctctgaggatggctgccccaacaatgagctggaaaacccaccttatgttcctggggtggttggtgggaccctccaggcagccaccatatgtgcctccagccaccagtttctctccacacactataacctccacaacctatatggactgacagaagccattgcctcccatagggcactggtgaaggctagaggtacaagaccatttgtgatatctagaagcacttttgctggccatggcagatatgcaggccactggactggagatgtttggagctcttgggagcagctggcctccagtgtgccagaaattctgcagtttaatctactaggggtgcctttggtaggggctgatgtctgtggctttctgggcaacacctcagaagagctttgtgtgagatggacccaactgggggccttctatcccttcatgagaaaccacaatagcctgctcagtttgccccaggagccatacagcttctcagagccagcccagcaggccatgaggaaggcccttactttaagatatgcactcctcccccacttgtacacactgtttcaccaggcccatgttgcaggagaaactgtggccagacccttgttcctggagttccctaaggactcttcaacctggactgtggaccaccaactcctctggggggaggccctcctcatcacaccagttctccaggcagggaaggctgaagttactggctacttccccttgggcacatggtatgaccttcagacagttccagtagaggcacttggcagcctcccacccccacctgcagctcccagagagccagcaattcactctgaagggcaatgggtgactctgccagccccactggacaccattaatgtccatttaagagctggttatatcatacccctgcagggccctggcctcacaaccacagagtccagacagcagcctatggctctggctgtagcattgactaaaggtggggaggcaagaggggagttattctgggatgatggagagtcactggaagtgttggagagaggggcatacacacaggttatcttcttggcaaggaataacacaatagtgaatgagttagtaagagtaaccagtgagggagctggcctgcagttacagaaggtgactgtccttggagtggccactgccccccagcaagtcctatccaatggtgtccctgtatccaacttcacctacagcccagacacaaaggtcctggatatctgtgtctccctgttgatgggagaacagtttctggtcagctggtgt

SEQ ID NO: 736 - DNA, 3384 bp, synthetic construct; identical to SEQ ID NO: 650
  source 1..3384: mol_type = other DNA

SEQ ID NO: 737 - DNA, 3384 bp, synthetic construct
  source 1..3384: mol_type = other DNA
caagtgcagctgcaggagtctggccctaaggtggtgaaaccatctgagacattgtccctgacttgcactgtatcaggagggtccattagtagttactactggaattggatcagacagagcccagggaagggactagagtggattggctacactaagagagggtacactgactacaaccccagcctcaggtctagagtgactatctctgaggacacctctaagaatcagttctccctgagaataagttctgtgacagcagctgacacagctgtgtactactgtgcccagatgggctggggcagtcatgcctttgacatgtggggccagggaacaatggtagctgtgagctctggaggatcaggggggggaggctctgggggggggggcagtgggggagagattgtcctaacccagtctcctggcaccctttccctttcccctggagagagagccactcttagctgcagagccagccagtctgtctccagctcttacctagcatggtaccaacaaaaacctggacaggctcctagacttcttatctatggagctagtagcagggccacaggcatcccagacaggttttcaggttctggctctggcacagacttcaccctgaccatatccagactggagccagaagattttgcagtctactactgccaacagtatggaagcagcccttggacatttggacaaggcaccaaggttgaaatcaaagggggagggggttctgcccaccctggcagacctagagcagtgcccacccagtgtgatgtgcctcctaacagcaggtttgactgtgcacctgacaaggccatcacccaggagcagtgtgaagccaggggttgctgctatatcccagccaaacagggtctgcagggagcccaaatgggccagccttggtgcttctttccaccctcttacccttcttacaagctggaaaacctatcttcaagtgagatgggctacacagccactctaacaagaaccacacctacctttttccccaaggacatcctcactctgagactggatgtaatgatggagactgaaaacagactccacttcaccattaaagacccagccaacagaagatatgaggtaccattggagaccccccatgtccacagcagagcacccagccccctatactcagtggaattctctgaggaaccttttggtgtcatagtgagaagacagctggatggcagagtgctcctcaacacaactgtggctccactgttttttgctgaccaattcctacagctgagcaccagcctgccctcccaatatatcacagggctggctgaacacctatcccctctgatgctgtccacctcctggaccaggatcactctgtggaacagggacttagcccctacccctggtgccaacctgtatggctctcacccattctacctggccctggaggatggaggttcagcccatggagtctttctcctgaactctaatgccatggatgtggtgctacagccatcccctgcattatcttggaggagcacaggaggaatcctggatgtatacatctttctgggcccagaaccaaagtcagttgtacagcagtaccttgatgtggtaggctaccccttcatgcctccatactggggtctgggcttccacctctgcagatggggctacagcagtacagctatcacaagacaggttgtggagaacatgacaagggctcacttccccctggatgtacagtggaatgacttggactacatggacagtagaagggacttcacattcaacaaggatggcttcagggacttccctgccatggtacaggaactccaccagggagggagaagatacatgatgattgtggacccagctatcagttctagtggtcctgcaggttcctacaggccctatgatgaaggcctcagaagaggagtgttcatcactaatgagacaggacagcctttgataggaaaggtctggcctggcagtacagctttcccagattttaccaatccaactgctttggcttggtgggaggacatggtggcagagttccatgaccaggtgccctttgatggcatgtggattgacatgaatgaaccatctaacttcatcagaggatcagaagatggatgccccaacaatgagctggagaaccctccttatgtgccaggtgtggtgggtggcaccctacaggctgcaaccatctgtgccagctcacaccagttcctgagtacacactacaatctacacaacctgtatggcctgactgaagctattgcctcacatagagcactagtcaaggccagagggaccaggccttttgttattagcagaagtacctttgctgggcatggcagatatgctgggcactggacaggtgatgtatggagcagctgggaacagttggcttcatctgttccagagatcctgcagttcaacctgttgggggtgcctttagtgggggcagatgtctgtggtttcttggggaacacctcagaggaactttgtgtcagatggacccaactgggggccttttacccctttatgagaaaccacaactctctgctcagcttgcctcaggaaccctattccttcagtgagcctgcccaacaggccatgaggaaggccctaaccctcagatatgcactgctgcctcacctgtacaccctttttcaccaggcccatgtggcaggtgagacagtagcaagacctctcttcttggagttccctaaagactcaagcacctggactgtggatcaccaactcctgtggggagaggctctgctgatcacacctgtactacaagctggtaaggctgaggtgacaggttacttccccctgggcacctggtatgatctgcagacagtccctgtagaggcactaggctctctgcctccccctcctgcagcccctagagagcctgctatccacagtgagggccaatgggtcaccctacctgctccactagacacaataaatgtgcacctgagagctggctatatcatccccctccagggaccaggtctgacaaccacagaatctagacaacagcccatggcactagcagttgccctgaccaagggaggtgaagccaggggtgagcttttctgggatgatggggagtccttggaggttctagaaagaggagcctacactcaggtcatcttcctggccagaaataacaccatagtgaatgagttggtgagagtgacctcagagggagctgggctccaactgcaaaaagtgacagtcttgggagtggccacagcaccacagcaggtcctcagcaatggggtgcctgtgagcaacttcacctactctccagacaccaaagtactggacatctgtgtgagcctgctgatgggtgagcaattcctggtgagctggtgc

SEQ ID NO: 738 - DNA, 3384 bp, synthetic construct
  source 1..3384: mol_type = other DNA
caagtgcagctgcaggagtctggccctaaggtggtgaaaccatctgagacattgtccctgacttgcactgtatcaggagggtccattagtagttactactggaattggatcagacagagcccagggaagggactagagtggattggctacactaagagagggtacactgactacaaccccagcctcaggtctagagtgactatctctgaggacacctctaagaatcagttctccctgagaataagttctgtgacagcagctgacacagctgtgtactactgtgcccagatgggctggggcagtcatgcctttgacatgtggggccagggaacaatggtagctgtgagctctggaggatcaggggggggaggctctggaggaggtggcagtgggggagagattgtcctaacccagtctcctggcaccctttccctttcccctggagagagagccactcttagctgcagagccagccagtctgtctccagctcttacctagcatggtaccaacaaaaacctggacaggctcctagacttcttatctatggagctagtagcagggccacaggcatcccagacaggttttcaggttctggctctggcacagacttcaccctgaccatatccagactggagccagaagattttgcagtctactactgccaacagtatggaagcagcccttggacatttggacaaggcaccaaggttgaaatcaaagggggagggggttctgcccaccctggcagacctagagcagtgcccacccagtgtgatgtgcctcctaacagcaggtttgactgtgcacctgacaaggccatcacccaggagcagtgtgaagccaggggttgctgctatatcccagccaaacagggtctgcagggagcccaaatgggccagccttggtgcttctttccaccctcttacccttcttacaagctggaaaacctatcttcaagtgagatgggctacacagccactctaacaagaaccacacctacctttttccccaaggacatcctcactctgagactggatgtaatgatggagactgaaaacagactccacttcaccattaaagacccagccaacagaagatatgaggtaccattggagaccccccatgtccacagcagagcacccagccccctatactcagtggaattctctgaggaaccttttggtgtcatagtgagaagacagctggatggcagagtgctcctcaacacaactgtggctccactgttttttgctgaccaattcctacagctgagcaccagcctgccctcccaatatatcacagggctggctgaacacctatcccctctgatgctgtccacctcctggaccaggatcactctgtggaacagggacttagcccctacccctggtgccaacctgtatggctctcacccattctacctggccctggaggatggaggttcagcccatggagtctttctcctgaactctaatgccatggatgtggtgctacagccatcccctgcattatcttggaggagcacaggaggaatcctggatgtatacatctttctgggcccagaaccaaagtcagttgtacagcagtaccttgatgtggtaggctaccccttcatgcctccatactggggtctgggcttccacctctgcagatggggctacagcagtacagctatcacaagacaggttgtggagaacatgacaagggctcacttccccctggatgtacagtggaatgacttggactacatggacagtagaagggacttcacattcaacaaggatggcttcagggacttccctgccatggtacaggaactccaccagggagggagaagatacatgatgattgtggacccagctatcagttctagtggtcctgcaggttcctacaggccctatgatgaaggcctcagaagaggagtgttcatcactaatgagacaggacagcctttgataggaaaggtctggcctggcagtacagctttcccagattttaccaatccaactgctttggcttggtgggaggacatggtggcagagttccatgaccaggtgccctttgatggcatgtggattgacatgaatgaaccatctaacttcatcagaggatcagaagatggatgccccaacaatgagctggagaaccctccttatgtgccaggtgtggtgggtggcaccctacaggctgcaaccatctgtgccagctcacaccagttcctgagtacacactacaatctacacaacctgtatggcctgactgaagctattgcctcacatagagcactagtcaaggccagagggaccaggccttttgttattagcagaagtacctttgctgggcatggcagatatgctgggcactggacaggtgatgtatggagcagctgggaacagttggcttcatctgttccagagatcctgcagttcaacctgttgggggtgcctttagtgggggcagatgtctgtggtttcttggggaacacctcagaggaactttgtgtcagatggacccaactgggggccttttacccctttatgagaaaccacaactctctgctcagcttgcctcaggaaccctattccttcagtgagcctgcccaacaggccatgaggaaggccctaaccctcagatatgcactgctgcctcacctgtacaccctttttcaccaggcccatgtggcaggtgagacagtagcaagacctctcttcttggagttccctaaagactcaagcacctggactgtggatcaccaactcctgtggggagaggctctgctgatcacacctgtactacaagctggtaaggctgaggtgacaggttacttccccctgggcacctggtatgatctgcagacagtccctgtagaggcactaggctctctgcctccccctcctgcagcccctagagagcctgctatccacagtgagggccaatgggtcaccctacctgctccactagacaccatcaatgtgcacctgagagctggctatatcatccccctccaaggaccaggtctgacaaccacagaatctagacaacagcccatggcactagcagttgccctgaccaagggaggtgaagccaggggtgagcttttctgggatgatggggagtccttggaggttctagaaagaggagcctacactcaggtcatcttcctggccagaaataacaccatagtgaatgagttggtgagagtgacctcagagggagctgggctccaactgcaaaaagtgacagtcttgggagtggccacagcaccacagcaggtcctcagcaatggggtgcctgtgagcaacttcacctactctccagacaccaaagtactggacatctgtgtgagcctgctgatgggtgagcaattcctggtgagctggtgc

SEQ ID NO: 739 - DNA, 3384 bp, synthetic construct
  source 1..3384: mol_type = other DNA
caggtacagctgcaggagtctgggcccaaagtagtgaaaccctctgaaaccctatcactgacctgcacagtttcaggtggaagcattagcagttactactggaactggatcagacagagtccaggcaagggtctggaatggataggctacaccaagagaggttacactgactacaacccatcccttcggtccagagtgaccatttcagaggacacatctaaaaaccagttctccctgagaatcagttctgtgactgctgctgacacagctgtgtactactgtgctcagatgggctggggctcccatgcctttgacatgtggggccagggcaccatggttgcagtgagctctggtggctctggaggaggtggatctggagggggaggctcaggaggtgagattgtgctgacccaaagtcctggcacattgagcctgagccctggagaaagggccactctctcttgcagggccagccagtctgtgtccagttcctacctggcttggtaccaacagaagcctggccaggcccctaggttgctgatctatggagccagctccagagccacagggatccctgacagattctcaggctctggctctggcacagacttcaccctgaccatcagcagactagagcctgaagactttgctgtgtactactgccagcagtatggaagcagcccttggacttttgggcagggcacaaaggttgagatcaaaggaggaggaggctcagcccaccctggcagacccagagcagtccccacccagtgtgatgtacctcccaacagcagatttgactgtgcccctgacaaggccatcacccaggaacagtgtgaggccagggggtgctgctatattcctgccaagcagggcctgcagggtgcccaaatgggccagccttggtgcttcttccctcccagctacccctcttacaagttagaaaacctgtctagctctgaaatgggctacacagccaccctgaccagaacaacccctactttcttcccaaaggacattttaaccctgaggctggatgtgatgatggagactgagaatagactgcacttcaccatcaaggacccagccaacagaaggtatgaagtgcctctggagaccccccatgtgcactctagggcacctagccctctatactcagtggagttctctgaagaaccttttggggtcatagtgaggaggcaactggatggcagagtgcttctgaacaccacagtggcccccctgttctttgctgaccaattcctgcagctgagtaccagcctgccttcacagtacatcacaggcctggctgaacacctgagccctctgatgttgagcaccagctggaccagaatcaccttatggaacagagacttagccccaacccctggagccaacctctatggaagccaccctttctacctggccctggaggatggaggctctgcccatggtgttttcctcctgaactccaatgccatggatgttgtgctgcaaccttcccctgctctgagctggagatcaacagggggtatcttagatgtgtacatcttcctgggccctgaaccaaagtctgtggtacagcagtacctggatgtagtgggctaccccttcatgcccccctactggggcctaggcttccacctgtgcaggtgggggtactctagcactgccatcaccagacaggtggtggagaacatgactagagcccactttccattggatgtgcaatggaatgaccttgactacatggactcaaggagggacttcacattcaacaaggatggcttcagagactttcctgccatggtgcaggagctgcaccaagggggcagaagatacatgatgattgtggacccagccatctcctcttcaggacctgctggttcttatagaccttatgatgagggccttagaagaggtgtgttcattaccaatgaaactggacagcctctgattggcaaggtgtggccaggctccactgccttccctgactttacaaaccctacagccctggcctggtgggaggatatggtagctgagttccatgaccaggtgccttttgatggcatgtggatagacatgaatgaaccaagtaacttcatcagaggtagtgaggatggctgtcccaacaatgagctggagaaccccccatatgttcctggagtggtgggtggtactctccaggctgctaccatttgtgcctcaagtcaccagttcctgagcacccactacaacctgcacaacctgtatggcctgactgaggctattgctagccacagggctctggtgaaggccaggggaacaagaccttttgtgatttctaggtcaacatttgcaggccatggaagatatgctggtcactggacaggtgatgtgtggtcttcctgggaacagctggccagttcagtgccagagatcctgcagttcaacctcctaggagtgccactggtgggggcagatgtttgtggctttctggggaacacctctgaagagctgtgtgtgagatggacccagctgggagccttctacccattcatgaggaaccacaacagtttgctttccctacctcaggagccctacagcttctctgagccagcccaacaggccatgagaaaggccttgacacttagatatgccctactgccccacttgtataccttattccaccaggctcatgtggctggtgagactgtggccaggcccctgttcctggagttccccaaggacagctccacctggacagtagaccatcagctcctgtggggagaggccctgcttatcacccctgtgctccaagctggcaaagcagaggtgacaggttacttccctctgggcacctggtatgatctccagacagtgcctgtggaagcattaggttctttgcctcctccacctgcagcccccagagagcctgccatccactctgaaggccagtgggtcaccctgcctgcccccctggacacaatcaatgtccacctgagagctggttacataatccctctgcaagggcctggcttgaccaccacagaaagcagacagcagcctatggccctggctgtagctctgactaagggaggtgaggcaagaggggagctgttctgggatgatggagagagcctggaagtgctagagagaggagcctacacccaagtcatcttcttggccaggaacaataccatagtgaatgagctggtgagggtgacctctgaaggggctggccttcaactccagaaggtgactgttctgggagtggccacagccccacagcaggtgctgtccaatggtgtgcctgtcagcaacttcacatacagcccagatactaaggtgctggatatctgtgttagccttctcatgggtgaacagttcttagtgtcatggtgc

SEQ ID NO: 740 - DNA, 3384 bp, synthetic construct
  source 1..3384: mol_type = other DNA
caggtgcagctgcaggagtctggccctaaggttgtgaaaccttctgagaccctgagcctgacttgcacagtgtcagggggctctatcagctcatactactggaactggatcagacaaagccctggcaagggcctggaatggattggctacactaagagaggctacacagactacaaccctagcctcaggagccgagtgaccatctcagaggacacatccaagaaccaattctcactgcggattagctctgtgacagctgctgacacagctgtgtactactgtgcccagatgggctggggcagccatgcctttgacatgtggggccagggcaccatggtggctgtgagctctgggggctcaggaggaggtggctcaggcggtggcggctccgggggggaaattgtcctcacccagagccctggcaccctgagcctgagccctggcgaaagagccacactgagctgcagggccagccagtcagtgtccagcagctacctggcttggtaccagcagaagcctggccaggcgccccggctgctgatttatggtgcctcatcccgggccacaggaatccctgacagatttagtggcagtggcagcgggactgactttacactgaccatcagcagactggaacctgaggattttgcagtgtactactgccagcagtatggcagcagcccttggacctttggccagggcaccaaggtggaaatcaagggaggggggggctcagcccaccctggcagacctagagctgtgcctacccagtgtgatgtgccacctaactccagatttgactgtgcccctgacaaggccatcacccaagagcagtgcgaggccaggggatgctgctacatccctgccaaacagggcctgcagggagcccagatgggccaaccctggtgctttttccctccctcttacccctcctacaagctggagaacctgagctcctcagagatgggctacacagctaccctgaccagaaccacccccaccttctttcctaaggacatcctgaccctgagactggatgtgatgatggaaacagagaaccggctgcacttcacaatcaaggacccagccaacagaagatatgaagttcccctggagacccctcatgtgcactccagggcccccagccccctatacagcgtggagttctctgaggagccttttggcgtcattgtgagaagacaactggatggcagagtgctgttgaacaccacagtggcccctctcttctttgctgaccaattcctgcagctgagcaccagtctgcccagccagtacatcactggcctggctgagcacctgtctcccttaatgctgtccaccagctggacaaggatcaccctgtggaaccgggacttggcccccacgcctggagccaacctatacggctcccaccccttctacctggccctggaggacggaggctcagcccatggagttttcctgctgaactctaacgccatggatgtggtgctgcaacctagccctgccctgagctggagaagcactggcggaattctcgatgtctacatcttcctgggacctgaaccaaagtcagtggtgcagcagtacctggatgtggtgggctaccccttcatgccaccttactggggcctgggatttcacctgtgcagatggggctactccagcacagccatcaccagacaggtggtggagaacatgacccgggcccacttccccctggatgtccagtggaatgacttagactacatggatagcagaagagacttcaccttcaacaaggatggctttagagacttccctgccatggtgcaggaactgcaccagggtggcagaagatacatgatgattgtggaccctgccatttctagctctggcccagcaggctcctacaggccctatgatgagggactgcggagaggggtcttcatcaccaatgagacaggccagccactgatcggcaaggtgtggcctggatccacagccttcccagacttcaccaaccctacagcccttgcctggtgggaagacatggtggccgaattccacgaccaggtgccctttgatggcatgtggatcgacatgaatgagcctagcaatttcatcagaggaagtgaggatggctgccccaacaatgaattagaaaacccgccctatgtgcctggcgttgtgggaggcaccctccaggctgccaccatctgtgccagcagccaccagttcttatccacacactacaacctgcacaacctgtatggcctgaccgaagccattgccagccacagagcgctggtgaaagccaggggcacccggccttttgtgatcagcagaagcaccttcgctggccatggcaggtatgccggacattggacaggagatgtatggagctcttgggagcagttggccagctctgtgcctgagatcctgcagttcaacctactgggggtccctctggtgggagcagatgtctgcggcttcctaggcaacacctcagaggaactgtgcgtaagatggacccagctgggggccttctaccctttcatgaggaaccacaactctctgctgagcctgcctcaggagccatacagcttctctgagccagcccagcaggccatgagaaaggccctgaccctgagatatgccttactgccccacctgtacacactgttccaccaggcccatgtggctggggagacagtggcacggcccctgttcttggagttccccaaggactccagcacctggacagtggaccaccagctgctctggggagaggccctgctcatcaccccagtgctgcaggctggcaaggctgaagtcacaggctacttccccctgggcacctggtatgacctccaaactgtgccagtggaggccctgggcagcctgcctcctccccctgctgctcctagagagcctgccatccactcggagggccagtgggtgacactgcctgcccccctagacaccatcaatgttcacctgagagcaggctacatcatcccactgcaaggccctggcctgaccaccactgagagcagacagcagcccatggccctggcagttgccctgaccaagggcggcgaagccagaggagaactgttctgggatgatggcgaatctttggaagtgctggagagaggggcctacacccaggtgatcttcctggcccggaacaacactatagtgaatgaactggtgcgggtgacatcagagggtgcaggcctgcagctgcaaaaagtgacagtgctgggtgtggcaacagcccctcagcaggtactatccaatggagtgccagtgagcaacttcacctacagcccagacactaaggtgctagacatctgtgtttctctgctgatgggagagcaattcctggtgagctggtgc

SEQ ID NO: 741 - DNA, 3384 bp, synthetic construct
  source 1..3384: mol_type = other DNA
caggtgcagctgcaggagtctggccctaaggttgtgaaaccttctgagaccctgagcctgacttgcacagtgtcagggggctctatcagctcatactactggaactggatcagacaaagccctggcaagggcctggaatggattggctacactaagagaggctacacagactacaaccctagcctcaggagccgagtgaccatctcagaggacacatccaagaaccaattctcactgcggattagctctgtgacagctgctgacacagctgtgtactactgtgcccagatgggctggggcagccatgcctttgacatgtggggccagggcaccatggtggctgtgagctctgggggctcaggaggaggtggctcaggcggtggcggctccgggggggaaatcgtgctcacccagagccctggcaccctgagcctgagccctggcgaaagagccacactgagctgcagggccagccagtcagtgtccagcagctacctggcttggtaccagcagaagcctggccaggcgccccggctgctgatttatggtgcctcatcccgggccacaggaatccctgacagatttagtggcagtggcagcgggactgactttacactgaccatcagcagactggaacctgaggattttgcagtgtactactgccagcagtatggcagcagcccttggacctttggccagggcaccaaggtggaaatcaagggaggggggggctcagcccaccctggcagacctagagctgtgcctacccagtgtgatgtgccacctaactccagatttgactgtgcccctgacaaggccatcacccaagagcagtgcgaggccaggggatgctgctacatccctgccaaacagggcctgcagggagcccagatgggccaaccctggtgctttttccctccctcttacccctcctacaagctggagaacctgagctcctcagagatgggctacacagctaccctgaccagaaccacccccaccttctttcctaaggacatcctgaccctgagactggatgtgatgatggaaacagagaaccggctgcacttcacaatcaaggacccagccaacagaagatatgaagttcccctggagacccctcatgtgcactccagggcccccagccccctatacagcgtggagttctctgaggagccttttggcgtcattgtgagaagacaactggatggcagagtgctgttgaacaccacagtggcccctctcttctttgctgaccaattcctgcagctgagcaccagtctgcccagccagtacatcactggcctggctgagcacctgtctcccttaatgctgtccaccagctggacaaggatcaccctgtggaaccgggacttggcccccacgcctggagccaacctatacggctcccaccccttctacctggccctggaggacggaggctcagcccatggagttttcctgctgaactctaacgccatggatgtggtgctgcaacctagccctgccctgagctggagaagcactggcggaattctcgatgtctacatcttcctgggacctgaaccaaagtcagtggtgcagcagtacctggatgtggtgggctaccccttcatgccaccttactggggcctgggatttcacctgtgcagatggggctactccagcacagccatcaccagacaggtggtggagaacatgacccgggcccacttccccctggatgtccagtggaatgacttagactacatggatagcagaagagacttcaccttcaacaaggatggctttagagacttccctgccatggtgcaggaactgcaccagggtggcagaagatacatgatgatcgttgaccctgccatttctagctctggcccagcaggctcctacaggccctatgatgagggactgcggagaggggtcttcatcaccaatgagacaggccagccactgatcggcaaggtgtggcctggatccacagccttcccagacttcaccaaccctacagcccttgcctggtgggaagacatggtggccgaattccacgaccaggtgccctttgatggcatgtggatcgacatgaatgagcctagcaatttcatcagaggaagtgaggatggctgccccaacaatgaattagaaaacccgccctatgtgcctggcgttgtgggaggcaccctccaggctgccaccatctgtgccagcagccaccagttcttatccacacactacaacctgcacaacctgtatggcctgaccgaagccattgccagccacagagcgctggtgaaagccaggggcacccggccttttgtgatcagcagaagcaccttcgctggccatggcaggtatgccggacattggacaggagacgtctggagctcttgggagcagttggccagctctgtgcctgagatcctgcagttcaacctactgggggtccctctggtgggagcagatgtctgcggcttcctaggcaacacctcagaggaactgtgcgtaagatggacccagctgggggccttctaccctttcatgaggaaccacaactctctgctgagcctgcctcaggagccatacagcttctctgagccagcccagcaggccatgagaaaggccctgaccctgagatatgccttactgccccacctgtacacactgttccaccaggcccacgtcgctggggagacagtggcacggcccctgttcttggagttccccaaggactccagcacctggacagtggaccaccagctgctctggggagaggccctgctcatcaccccagtgctgcaggctggcaaggctgaagtcacaggctacttccccctgggcacctggtatgacctccaaactgtgccagtggaggccctgggcagcctgcctcctccccctgctgctcctagagagcctgccatccactcggagggccagtgggtgacactgcctgcccccctagacaccatcaatgttcacctgagagcaggctacatcatcccactgcaaggccctggcctgaccaccactgagagcagacagcagcccatggccctggccgttgccctgaccaagggcggcgaagccagaggagaactgttctgggatgatggcgaatctttggaagtgctggagagaggggcctacacccaggtgatcttcctggcccggaacaacactatcgttaatgaactggtgcgggtgacatcagagggtgcaggcctgcagctgcaaaaagtgacagtgctgggtgtggcaacagcccctcagcaggtactatccaatggagtgccagtgagcaacttcacctacagcccagacactaaggtgctagacatctgtgtttctctgctgatgggagagcaattcctggtgagctggtgc

SEQ ID NO: 742 - DNA, 3384 bp, synthetic construct
  source 1..3384: mol_type = other DNA
caggtgcagctgcaggaatctggacctaaggtggtgaagccttctgaaacactgtctctgacatgtacagtgtctggaggatctatctcttcttattattggaattggatcagacagtctcctggaaagggactggaatggatcggatatacaaagagaggatatacagattataatccttctctgagatctagagtgacaatctctgaagatacatctaagaatcagttttctctgagaatctcttctgtgacagctgctgatacagctgtgtattattgtgctcagatgggatggggatctcatgcttttgatatgtggggacagggaacaatggtggctgtgtcttctggaggatctggaggaggaggatctggaggaggaggatctggaggagaaatcgtgctgacacagtctcctggaacactgtctctgtctcctggagaaagagctacactgtcttgtagagcttctcagtctgtgtcttcttcttatctggcttggtatcagcagaagcctggacaggctcctagactgctgatctatggagcttcttctagagctacaggaatccctgatagattttctggatctggatctggaacagattttacactgacaatctctagactggaacctgaagattttgctgtgtattattgtcagcagtatggatcttctccttggacatttggacagggaacaaaggtggaaatcaagggaggaggaggatctgctcatcctggaagacctagagctgtgcctacacagtgtgatgtgcctcctaattctagatttgattgtgctcctgataaggctatcacacaggaacagtgtgaagctagaggatgttgttatatccctgctaagcagggactgcagggagctcagatgggacagccttggtgtttttttcctccttcttatccttcttataagctggaaaatctgtcttcttctgaaatgggatatacagctacactgacaagaacaacacctacattttttcctaaggatatcctgacactgagactggatgtgatgatggaaacagaaaatagactgcattttacaatcaaggatcctgctaatagaagatatgaagtgcctctggaaacacctcatgtgcattctagagctccttctcctctgtattctgtggaattttctgaagaaccttttggagtgatcgtgagaagacagctggatggaagagtgctgctgaatacaacagtggctcctctgttttttgctgatcagtttctgcagctgtctacatctctgccttctcagtatatcacaggactggctgaacatctgtctcctctgatgctgtctacatcttggacaagaatcacactgtggaatagagatctggctcctacacctggagctaatctgtatggatctcatcctttttatctggctctggaagatggaggatctgctcatggagtgtttctgctgaattctaatgctatggatgtggtgctgcagccttctcctgctctgtcttggagatctacaggaggaatcctggatgtgtatatctttctgggacctgaacctaagtctgtggtgcagcagtatctggatgtggtgggatatccttttatgcctccttattggggactgggatttcatctgtgtagatggggatattcttctacagctatcacaagacaggtggtggaaaatatgacaagagctcattttcctctggatgtgcagtggaatgatctggattatatggattctagaagagattttacatttaataaggatggatttagagattttcctgctatggtgcaggaactgcatcagggaggaagaagatatatgatgatcgtggatcctgctatctcttcttctggacctgctggatcttatagaccttatgatgaaggactgagaagaggagtgtttatcacaaatgaaacaggacagcctctgatcggaaaggtgtggcctggatctacagcttttcctgattttacaaatcctacagctctggcttggtgggaagatatggtggctgaatttcatgatcaggtgccttttgatggaatgtggatcgatatgaatgaaccttctaattttatcagaggatctgaagatggatgtcctaataatgaactggaaaatcctccttatgtgcctggagtggtgggaggaacactgcaggctgctacaatctgtgcttcttctcatcagtttctgtctacacattataatctgcataatctgtatggactgacagaagctatcgcttctcatagagctctggtgaaggctagaggaacaagaccttttgtgatctctagatctacatttgctggacatggaagatatgctggacattggacaggagatgtgtggtcttcttgggaacagctggcttcttctgtgcctgaaatcctgcagtttaatctgctgggagtgcctctggtgggagctgatgtgtgtggatttctgggaaatacatctgaagaactgtgtgtgagatggacacagctgggagctttttatccttttatgagaaatcataattctctgctgtctctgcctcaggaaccttattctttttctgaacctgctcagcaggctatgagaaaggctctgacactgagatatgctctgctgcctcatctgtatacactgtttcatcaggctcatgtggctggagaaacagtggctagacctctgtttctggaatttcctaaggattcttctacatggacagtggatcatcagctgctgtggggagaagctctgctgatcacacctgtgctgcaggctggaaaggctgaagtgacaggatattttcctctgggaacatggtatgatctgcagacagtgcctgtggaagctctgggatctctgcctcctcctcctgctgctcctagagaacctgctatccattctgaaggacagtgggtgacactgcctgctcctctggatacaatcaatgtgcatctgagagctggatatatcatccctctgcagggacctggactgacaacaacagaatctagacagcagcctatggctctggctgtggctctgacaaagggaggagaagctagaggagaactgttttgggatgatggagaatctctggaagtgctggaaagaggagcttatacacaggtgatctttctggctagaaataatacaatcgtgaatgaactggtgagagtgacatctgaaggagctggactgcagctgcagaaggtgacagtgctgggagtggctacagctcctcagcaggtgctgtctaatggagtgcctgtgtctaattttacatattctcctgatacaaaggtgctggatatctgtgtgtctctgctgatgggagaacagtttctggtgtcttggtgt

SEQ ID NO: 743 - DNA, 11 bp, synthetic construct
  source 1..11: mol_type = other DNA
ggggggggggg

SEQ ID NO: 744 - DNA, 11 bp, synthetic construct
  source 1..11: mol_type = other DNA
ggaggaggtgg

SEQ ID NO: 745 - DNA, 3411 bp, synthetic construct
  source 1..3411: mol_type = other DNA
gacatccagatgacccagagccccagctccctgtcagccagtgtgggtgacagagtgaccatcacctgcagagccagccagagcatcagcagctacctgaactggtaccagcagaaacctggcaaagcccccaagctgctgatttatgctgctagcagcctgcagagtggagtgcccagcagattctcaggcagtggctctggcacagacttcaccctgaccatctccagcctgcagccagaagactttgccacctactactgccagcagagctacagcacccctcctatcacctttggccagggcacaagactggagatcaagggaggaggaggctctggaggaggaggctctggagggggaggctctgaggtccaactggttgaatctggagggggcctggtgcaacctggcaggagcctgagactgagctgtgctgcctctggcttcacctttgatgactatgccatgaactgggtgagacaggcccctggcaagggcctggagtgggtgtctggcatcagctggagctctggcagcatggactatgcagattctgtgaagggcaggttcaccatcagcagagataatgccaagaacagcctgtacctgcagatgaacagcctcaggacagaggacacagccctgtactactgtgccaaggccagagaagtgggtgactactatggcatggatgtgtggggccagggcaccacagtgacagtgagctctgggggaggaggctcaggtgggggtggcagtgcccatcctggcagacctagagctgtgcccacacagtgtgatgtgcctccaaacagcagatttgactgtgcccctgacaaggccatcacacaagagcagtgtgaagccagaggctgctgttacatccctgccaagcaaggactgcaaggggctcagatgggacagccctggtgcttcttcccaccatcttaccccagctacaagctggaaaacctgagcagctctgagatgggctacactgctacactgaccagaaccacacctacattcttcccaaaggacatcctgacactgaggctggatgtgatgatggaaacagagaacaggctgcacttcaccatcaaggaccctgccaatagaagatatgaggtgcccctggaaacccctcatgtgcactctagagccccatctccactgtactctgtggaattttctgaggaaccctttggggtcatagtcagaaggcagctggatggcagagtgctgctgaacacaactgtggcccctctgttctttgctgatcagttcctgcagctgagcaccagcctgcctagccagtatatcacaggcctggcagagcacctgtctccactgatgctgagcacatcctggaccagaatcaccctgtggaacagagacctggctcccacacctggggccaacctgtatggctctcaccccttctatctggccctggaagatggtggttcagcccatggtgtctttctgctgaactccaatgccatggatgtggtgctgcagccctctcctgctctgtcttggagaagcactggtggcatcctggatgtgtacatctttctgggccctgagcctaagtctgtggtgcagcagtacctggatgttgtgggctaccccttcatgcctccttattggggcctgggcttccacctgtgcagatggggatacagcagcacagccatcaccagacaggttgtggaaaacatgaccagagcacacttcccactggatgtgcagtggaatgacctggactacatggacagcagaagggacttcaccttcaacaaggatggcttcagagacttccctgccatggtgcaagagctgcaccaagggggcagaagatatatgatgattgtggacccagccatcagctcctctggaccagctggcagctacagaccctatgatgagggactgagaagaggggtgttcatcaccaatgagacaggccagcctctgattggcaaagtgtggccaggctccacagcctttccagatttcacaaaccccacagctctggcttggtgggaagatatggtggcagagttccatgatcaggtgccctttgatggcatgtggattgacatgaatgagcccagcaacttcatcaggggctctgaggatggatgccccaacaatgaactggaaaatcctccttatgtgcctggtgttgttggagggacactgcaggcagccacaatttgtgccagctctcaccagtttctgagcacccactacaacctgcacaatctgtatggcctgactgaggccattgccagccacagggctcttgtgaaggctagaggcaccagaccttttgtgatcagcaggtccacctttgctggccatggcagatatgctggccactggactggggatgtgtggtctagttgggagcagctggctagctctgtgcctgagatcctgcagttcaacctgctgggagtgccccttgttggagcagatgtgtgtggcttcctgggcaacacctcagaggaactgtgtgtcagatggactcagctgggagcattctaccctttcatgagaaaccacaacagcctgctgagcctgcctcaagagccttacagcttttctgagccagcacagcaggccatgagaaaggccctgactctgagatatgccctgctgcctcacctgtacaccctgttccatcaggctcatgtggctggggagactgtggctagacccctgttcctggaattccccaaggacagctccacctggacagtggatcatcagctgctgtggggagaagccctgctgattacacctgtgctgcaggctggcaaggctgaagtgacaggctacttccctcttggcacttggtatgacctgcagacagtgcctgtggaagctctgggatctctgcctccacctcctgctgctcctagagagcctgccattcactctgaaggccagtgggttaccctgcctgctccactggataccatcaatgtgcatctgagagcaggctacatcatccctctgcaaggccctggcctgaccaccacagaatctagacagcagccaatggcactggctgtggccctgaccaaagggggagaagctagaggggagctgttctgggatgatggggagagcctggaagtgctggaaagaggggcctatacacaagtgatttttctggctaggaacaataccattgtgaatgagcttgtcagagtcacctctgaaggtgctggcctgcagctccagaaagtgacagtgcttggagtggccacagcaccccagcaagtgctgtctaatggggtgccagtgtccaacttcacatacagccctgataccaaggtcctggacatctgtgtgtccctgcttatgggagagcagttcctggtgtcttggtgc

SEQ ID NO: 746 - protein, 1137 aa, synthetic construct
DIQMTQSPSSLSASVGDRVTITCRASQSISSYLNWYQQKPGKAPKLLIYAASSLQSGVPSRFSGSGSGTDFTLTISSLQPEDFATYYCQQSYSTPPITFGQGTRLEIKGGGGSGGGGSGGGGSEVQLVESGGGLVQPGRSLRLSCAASGFTFDDYAMNWVRQAPGKGLEWVSGISWSSGSMDYADSVKGRFTISRDNAKNSLYLQMNSLRTEDTALYYCAKAREVGDYYGMDVWGQGTTVTVSSGGGGSGGGGSAHPGRPRAVPTQCDVPPNSRFDCAPDKAITQEQCEARGCCYIPAKQGLQGAQMGQPWCFFPPSYPSYKLENLSSSEMGYTATLTRTTPTFFPKDILTLRLDVMMETENRLHFTIKDPANRRYEVPLETPHVHSRAPSPLYSVEFSEEPFGVIVRRQLDGRVLLNTTVAPLFFADQFLQLSTSLPSQYITGLAEHLSPLMLSTSWTRITLWNRDLAPTPGANLYGSHPFYLALEDGGSAHGVFLLNSNAMDVVLQPSPALSWRSTGGILDVYIFLGPEPKSVVQQYLDVVGYPFMPPYWGLGFHLCRWGYSSTAITRQVVENMTRAHFPLDVQWNDLDYMDSRRDFTFNKDGFRDFPAMVQELHQGGRRYMMIVDPAISSSGPAGSYRPYDEGLRRGVFITNETGQPLIGKVWPGSTAFPDFTNPTALAWWEDMVAEFHDQVPFDGMWIDMNEPSNFIRGSEDGCPNNELENPPYVPGVVGGTLQAATICASSHQFLSTHYNLHNLYGLTEAIASHRALVKARGTRPFVISRSTFAGHGRYAGHWTGDVWSSWEQLASSVPEILQFNLLGVPLVGADVCGFLGNTSEELCVRWTQLGAFYPFMRNHNSLLSLPQEPYSFSEPAQQAMRKALTLRYALLPHLYTLFHQAHVAGETVARPLFLEFPKDSSTWTVDHQLLWGEALLITPVLQAGKAEVTGYFPLGTWYDLQTVPVEALGSLPPPPAAPREPAIHSEGQWVTLPAPLDTINVHLRAGYIIPLQGPGLTTTESRQQPMALAVALTKGGEARGELFWDDGESLEVLERGAYTQVIFLARNNTIVNELVRVTSEGAGLQLQKVTVLGVATAPQQVLSNGVPVSNFTYSPDTKVLDICVSLLMGEQFLVSWC

SEQ ID NO: 747 - DNA, 45 bp, synthetic construct
  source 1..45: mol_type = other DNA
gggggctcaggaggaggtggctcaggaggtggaggttcaggaggg

SEQ ID NO: 748 - DNA, 15 bp, synthetic construct
  source 1..15: mol_type = other DNA
gggggtggtggctct

SEQ ID NO: 749 - DNA, 2649 bp, synthetic construct
  source 1..2649: mol_type = other DNA
gcccatcctggcagacctagagctgtgcccacacagtgtgatgtgcctccaaacagcagatttgactgtgcccctgacaaggccatcacacaagagcagtgtgaagccagaggctgctgttacatccctgccaagcaaggactgcaaggggctcagatgggacagccctggtgcttcttcccaccatcttaccccagctacaagctggaaaacctgagcagctctgagatgggctacactgctacactgaccagaaccacacctacattcttcccaaaggacatcctgacactgaggctggatgtgatgatggaaacagagaacaggctgcacttcaccatcaaggaccctgccaatagaagatatgaggtgcccctggaaacccctcatgtgcactctagagccccatctccactgtactctgtggaattttctgaggaaccctttggggtcatagtcagaaggcagctggatggcagagtgctgctgaacacaactgtggcccctctgttctttgctgatcagttcctgcagctgagcaccagcctgcctagccagtatatcacaggcctggcagagcacctgtctccactgatgctgagcacatcctggaccagaatcaccctgtggaacagagacctggctcccacacctggggccaacctgtatggctctcaccccttctatctggccctggaagatggtggttcagcccatggtgtctttctgctgaactccaatgccatggatgtggtgctgcagccctctcctgctctgtcttggagaagcactggtggcatcctggatgtgtacatctttctgggccctgagcctaagtctgtggtgcagcagtacctggatgttgtgggctaccccttcatgcctccttattggggcctgggcttccacctgtgcagatggggatacagcagcacagccatcaccagacaggttgtggaaaacatgaccagagcacacttcccactggatgtgcagtggaatgacctggactacatggacagcagaagggacttcaccttcaacaaggatggcttcagagacttccctgccatggtgcaagagctgcaccaaggtggtagaagatatatgatgattgtggacccagccatcagctcctctggaccagctggcagctacagaccctatgatgagggactgagaagaggggtgttcatcaccaatgagacaggccagcctctgattggcaaagtgtggccaggctccacagcctttccagatttcacaaaccccacagctctggcttggtgggaagatatggtggcagagttccatgatcaggtgccctttgatggcatgtggattgacatgaatgagcccagcaacttcatcaggggctctgaggatggatgccccaacaatgaactggaaaatcctccttatgtgcctggtgttgttggagggacactgcaggcagccacaatttgtgccagctctcaccagtttctgagcacccactacaacctgcacaatctgtatggcctgactgaggccattgccagccacagggctcttgtgaaggctagaggcaccagaccttttgtgatcagcaggtccacctttgctggccatggcagatatgctggccactggactggggatgtgtggtctagttgggagcagctggctagctctgtgcctgagatcctgcagttcaacctgctgggagtgccccttgttggagcagatgtgtgtggcttcctgggcaacacctcagaggaactgtgtgtcagatggactcagctgggagcattctaccctttcatgagaaaccacaacagcctgctgagcctgcctcaagagccttacagcttttctgagccagcacagcaggccatgagaaaggccctgactctgagatatgccctgctgcctcacctgtacaccctgttccatcaggctcatgtggctggggagactgtggctagacccctgttcctggaattccccaaggacagctccacctggacagtggatcatcagctgctgtggggagaagccctgctgattacacctgtgctgcaggctggcaaggctgaagtgacaggctacttccctcttggcacttggtatgacctgcagacagtgcctgtggaagctctgggatctctgcctccacctcctgctgctcctagagagcctgccattcactctgaaggccagtgggttaccctgcctgctccactggataccatcaatgtgcatctgagagcaggctacatcatccctctgcaaggccctggcctgaccaccacagaatctagacagcagccaatggcactggctgtggccctgaccaaagggggagaagctagaggggagctgttctgggatgatggggagagcctggaagtgctggaaagaggggcctatacacaagtgatttttctggctaggaacaataccattgtgaatgagcttgtcagagtcacctctgaaggtgctggcctgcagctccagaaagtgacagtgcttggagtggccacagcaccccagcaagtgctgtctaatggggtgccagtgtccaacttcacatacagccctgataccaaggtcctggacatctgtgtgtccctgcttatgggagagcagttcctggtgtcttggtgc

SEQ ID NO: 750 - DNA, 2649 bp, synthetic construct
  source 1..2649: mol_type = other DNA
gcccatcctggcagacctagagctgtgcccacacagtgtgatgtgcctccaaacagcagatttgactgtgcccctgacaaggccatcacacaagagcagtgtgaagccagaggctgctgttacatccctgccaagcaaggactgcaaggggctcagatgggacagccctggtgcttcttcccaccatcttaccccagctacaagctggaaaacctgagcagctctgagatgggctacactgctacactgaccagaaccacacctacattcttcccaaaggacatcctgacactgaggctggatgtgatgatggaaacagagaacaggctgcacttcaccatcaaggaccctgccaatagaagatatgaggtgcccctggaaacccctcatgtgcactctagagccccatctccactgtactctgtggaattttctgaggaaccctttggggtcatagtcagaaggcagctggatggcagagtgctgctgaacacaactgtggcccctctgttctttgctgatcagttcctgcagctgagcaccagcctgcctagccagtatatcacaggcctggcagagcacctgtctccactgatgctgagcacatcctggaccagaatcaccctgtggaacagagacctggctcccacacctggggccaacctgtatggctctcaccccttctatctggccctggaagatggtggttcagcccatggtgtctttctgctgaactccaatgccatggatgtggtgctgcagccctctcctgctctgtcttggagaagcactggtggcatcctggatgtgtacatctttctgggccctgagcctaagtctgtggtgcagcagtacctggatgttgtgggctaccccttcatgcctccttattggggcctgggcttccacctgtgcagatggggatacagcagcacagccatcaccagacaggttgtggaaaacatgaccagagcacacttcccactggatgtgcagtggaatgacctggactacatggacagcagaagggacttcaccttcaacaaggatggcttcagagacttccctgccatggtgcaagagctgcaccaagggggcagaagatatatgatgattgtggacccagccatcagctcctctggaccagctggcagctacagaccctatgatgagggactgagaagaggggtgttcatcaccaatgagacaggccagcctctgattggcaaagtgtggccaggctccacagcctttccagatttcacaaaccccacagctctggcttggtgggaagatatggtggcagagttccatgatcaggtgccctttgatggcatgtggattgacatgaatgagcccagcaacttcatcaggggctctgaggatggatgccccaacaatgaactggaaaatcctccttatgtgcctggtgttgttggagggacactgcaggcagccacaatttgtgccagctctcaccagtttctgagcacccactacaacctgcacaatctgtatggcctgactgaggccattgccagccacagggctcttgtgaaggctagaggcaccagaccttttgtgatcagcaggtccacctttgctggccatggcagatatgctggccactggactggggatgtgtggtctagttgggagcagctggctagctctgtgcctgagatcctgcagttcaacctgctgggagtgccccttgttggagcagatgtgtgtggcttcctgggcaacacctcagaggaactgtgtgtcagatggactcagctgggagcattctaccctttcatgagaaaccacaacagcctgctgagcctgcctcaagagccttacagcttttctgagccagcacagcaggccatgagaaaggccctgactctgagatatgccctgctgcctcacctgtacaccctgttccatcaggctcatgtggctggggagactgtggctagacccctgttcctggaattccccaaggacagctccacctggacagtggatcatcagctgctgtggggagaagccctgctgattacacctgtgctgcaggctggcaaggctgaagtgacaggctacttccctcttggcacttggtatgacctgcagacagtgcctgtggaagctctgggatctctgcctccacctcctgctgctcctagagagcctgccattcactctgaaggccagtgggttaccctgcctgctccactggataccatcaatgtgcatctgagagcaggctacatcatccctctgcaaggccctggcctgaccaccacagaatctagacagcagccaatggcactggctgtggccctgaccaaagggggagaagctagaggggagctgttctgggatgatggggagagcctggaagtgctggaaagaggggcctatacacaagtgatttttctggctaggaacaataccattgtgaatgagcttgtcagagtcacctctgaaggtgctggcctgcagctccagaaagtgacagtgcttggagtggccacagcaccccagcaagtgctgtctaatggggtgccagtgtccaacttcacatacagccctgataccaaggtcctggacatctgtgtgtccctgcttatgggagagcagttcctggtgtcttggtgc

SEQ ID NO: 751 - DNA, 276 bp, synthetic construct
  source 1..276: mol_type = other DNA
cctctactgtgccttctagttgccagccatctgttgtttgcccctcccccttgccttccttgaccctggaaggtgccactcccactgtcctttcctaataaaatgaggaaattgcatcacattgtctgagtaggtgtcattctattctggggggtggggtggggcaggacagcaagggggaggattgggaagacaatagcaggcatgctggggatgcagtgggctctatggcttctgaggtggaaagaaccagctggggctctagggggtatcccc

SEQ ID NO: 752 - DNA, 227 bp, synthetic construct
  source 1..227: mol_type = other DNA
gacatgataagatacattgatgagtttggacaaaccacaactagaatgcagtgaaaaaaatgcttgatttgtgaaatttgtgatgctattgcttgatttgtaaccattataagctgcaataaacaagttaacaacaacaattgcattcattttatgtttcaggttcagggggaggtgtgggaggttttttaaagcaagtaaaacctctacaaatgtggtatggctga

SEQ ID NO: 753 - DNA, 49 bp, synthetic construct
  source 1..49: mol_type = other DNA
aataaaagatctttattttcattagatctgtgtgttggttttttgtgtg

SEQ ID NO: 754 - DNA, 600 bp, synthetic construct
  source 1..600: mol_type = other DNA
aatgtaatagtcacggacattattatcggtctgggatgtcatagtagcttaacggtagcgtgttggaacggtattcggtcacacaaccatgcgacacgtttaagttctgatacagtgcaaagggcttctcatccaattggtctacctgaagactatggtagacatctatgctgccaagttgattttggggtacagtaactgtctaaactagaagatcttttttctaaccagcggcaaaccggttcaggtaaatggtacccgatccgcttgctgctggcgtggccaccgtaaggtgttgtacttgaattggctgaatgacgaatgtgacacggcgagcatctccgattggaggggacacggtgcggcacctacggggtctgaaatttggaccacgatggactctctcgaatgcagacgctcttaatacccaaagatcacggcacgcgacgcttaacttaggttggccatgagtaacttcgcggtctggcggcgccggggttgtcatggttccgtcctgcgatactttcttcaaaagtgtcagccattcgttccacactagctcgatcccacaaccaaagatatagggagggtgattcggac

SEQ ID NO: 755 - DNA, 31 bp, synthetic construct
  source 1..31: mol_type = other DNA
ctggccttgggggagggggaggccagaatga

SEQ ID NO: 756 - DNA, 3384 bp, synthetic construct
  source 1..3384: mol_type = other DNA
caagtccagctgcaagagtctggccccaaggtggtcaagccctctgagacactgagcctgacctgcacagtgtctggtggcagcatcagcagctactactggaactggatcagacagagccctggcaaaggactggaatggattggctacaccaagagaggctacacagactacaaccccagcctgagaagcagagtgaccatctctgaggacaccagcaagaaccagttcagcctgaggatcagctctgtgacagctgctgacacagcagtttactactgtgcccagatgggctggggcagccatgcctttgatatgtggggccagggcacaatggtggctgtgtccagtgggggctcaggaggaggtggctcaggaggtggaggttcaggaggggagattgtgctgacccagtctcctggcacactgtctctgagccctggggaaagagccacactgagctgtagagccagccagtctgtgtcctctagctacctggcctggtatcagcagaagcctggacaggctcccagactgctgatctatggggcctcttctagagccacaggcatccctgacagattcagtggcagtggctctggcacagacttcaccctgaccatcagcagactggaacctgaggactttgctgtgtactattgccagcagtatggcagcagcccctggacatttggacagggcaccaaggtggaaatcaaagggggtggtggctctgcccatcctggcagacctagagctgtgcccacacagtgtgatgtgcctccaaacagcagatttgactgtgcccctgacaaggccatcacacaagagcagtgtgaagccagaggctgctgttacatccctgccaagcaaggactgcaaggggctcagatgggacagccctggtgcttcttcccaccatcttaccccagctacaagctggaaaacctgagcagctctgagatgggctacactgctacactgaccagaaccacacctacattcttcccaaaggacatcctgacactgaggctggatgtgatgatggaaacagagaacaggctgcacttcaccatcaaggaccctgccaatagaagatatgaggtgcccctggaaacccctcatgtgcactctagagccccatctccactgtactctgtggaattttctgaggaaccctttggggtcatagtcagaaggcagctggatggcagagtgctgctgaacacaactgtggcccctctgttctttgctgatcagttcctgcagctgagcaccagcctgcctagccagtatatcacaggcctggcagagcacctgtctccactgatgctgagcacatcctggaccagaatcaccctgtggaacagagacctggctcccacacctggggccaacctgtatggctctcaccccttctatctggccctggaagatggtggttcagcccatggtgtctttctgctgaactccaatgccatggatgtggtgctgcagccctctcctgctctgtcttggagaagcactggtggcatcctggatgtgtacatctttctgggccctgagcctaagtctgtggtgcagcagtacctggatgttgtgggctaccccttcatgcctccttattggggcctgggcttccacctgtgcagatggggatacagcagcacagccatcaccagacaggttgtggaaaacatgaccagagcacacttcccactggatgtgcagtggaatgacctggactacatggacagcagaagggacttcaccttcaacaaggatggcttcagagacttccctgccatggtgcaagagctgcaccaagggggcagaagatatatgatgattgtggacccagccatcagctcctctggaccagctggcagctacagaccctatgatgagggactgagaagaggggtgttcatcaccaatgagacaggccagcctctgattggcaaagtgtggccaggctccacagcctttccagatttcacaaaccccacagctctggcttggtgggaagatatggtggcagagttccatgatcaggtgccctttgatggcatgtggattgacatgaatgagcccagcaacttcatcaggggctctgaggatggatgccccaacaatgaactggaaaatcctccttatgtgcctggtgttgttggagggacactgcaggcagccacaatttgtgccagctctcaccagtttctgagcacccactacaacctgcacaatctgtatggcctgactgaggccattgccagccacagggctcttgtgaaggctagaggcaccagaccttttgtgatcagcaggtccacctttgctggccatggcagatatgctggccactggactggggatgtgtggtctagttgggagcagctggctagctctgtgcctgagatcctgcagttcaacctgctgggagtgccccttgttggagcagatgtgtgtggcttcctgggcaacacctcagaggaactgtgtgtcagatggactcagctgggagcattctaccctttcatgagaaaccacaacagcctgctgagcctgcctcaagagccttacagcttttctgagccagcacagcaggccatgagaaaggccctgactctgagatatgccctgctgcctcacctgtacaccctgttccatcaggctcatgtggctggggagactgtggctagacccctgttcctggaattccccaaggacagctccacctggacagtggatcatcagctgctgtggggagaagccctgctgattacacctgtgctgcaggctggcaaggctgaagtgacaggctacttccctcttggcacttggtatgacctgcagacagtgcctgtggaagctctgggatctctgcctccacctcctgctgctcctagagagcctgccattcactctgaaggccagtgggttaccctgcctgctccactggataccatcaatgtgcatctgagagcaggctacatcatccctctgcaaggccctggcctgaccaccacagaatctagacagcagccaatggcactggctgtggccctgaccaaagggggagaagctagaggggagctgttctgggatgatggggagagcctggaagtgctggaaagaggggcctatacacaagtgatttttctggctaggaacaataccattgtgaatgagcttgtcagagtcacctctgaaggtgctggcctgcagctccagaaagtgacagtgcttggagtggccacagcaccccagcaagtgctgtctaatggggtgccagtgtccaacttcacatacagccctgataccaaggtcctggacatctgtgtgtccctgcttatgggagagcagttcctggtgtcttggtgc

SEQ ID NO: 757 - DNA, 3384 bp, synthetic construct
  source 1..3384: mol_type = other DNA
caggtccagctgcaagagtctggccccaaggtggtcaagccctctgagacactgagcctgacctgcacagtgtctggtggcagcatcagcagctactactggaactggatcagacagagccctggcaaaggcctggaatggattggctacaccaagagaggctacacagactacaaccccagcctgagaagcagagtgaccatctctgaggacaccagcaagaaccagttcagcctgaggatcagctctgtgacagctgctgacacagcagtttactactgtgcccagatgggctggggcagccatgcctttgatatgtggggccagggcacaatggtggctgtgtccagtgggggctcaggaggaggtggctcaggaggtggaggttcaggaggggagattgtgctgacccagtctcctggcacactgtctctgagccctggggaaagagccacactgagctgtagagccagccagtctgtgtcctctagctacctggcctggtatcagcagaagcctggacaggctcccagactgctgatctatggggcctcttctagagccacaggcatccctgacagattcagtggcagtggctctggcacagacttcaccctgaccatcagcagactggaacctgaggactttgctgtgtactattgccagcagtatggcagcagcccctggacatttggacagggcaccaaggtggaaatcaaagggggtggtggctctgcccatcctggcagacctagagctgtgcccacacagtgtgatgtgcctccaaacagcagatttgactgtgcccctgacaaggccatcacacaagagcagtgtgaagccagaggctgctgttacatccctgccaagcaaggactgcaaggggctcagatgggacagccctggtgcttcttcccaccatcttaccccagctacaagctggaaaacctgagcagctctgagatgggctacactgctacactgaccagaaccacacctacattcttcccaaaggacatcctgacactgaggctggatgtgatgatggaaacagagaacaggctgcacttcaccatcaaggaccctgccaatagaagatatgaggtgcccctggaaacccctcatgtgcactctagagccccatctccactgtactctgtggaattttctgaggaaccctttggggtcatagtcagaaggcagctggatggcagagtgctgctgaacacaactgtggcccctctgttctttgctgatcagttcctgcagctgagcaccagcctgcctagccagtatatcacaggcctggcagagcacctgtctccactgatgctgagcacatcctggaccagaatcaccctgtggaacagagacctggctcccacacctggggccaacctgtatggctctcaccccttctatctggccctggaagatggtggttcagcccatggtgtctttctgctgaactccaatgccatggatgtggtgctgcagccctctcctgctctgtcttggagaagcactggtggcatcctggatgtgtacatctttctgggccctgagcctaagtctgtggtgcagcagtacctggatgttgtgggctaccccttcatgcctccttattggggcctgggcttccacctgtgcagatggggatacagcagcacagccatcaccagacaggttgtggaaaacatgaccagagcacacttcccactggatgtgcagtggaatgacctggactacatggacagcagaagggacttcaccttcaacaaggatggcttcagagacttccctgccatggtgcaagagctgcaccaagggggcagaagatatatgatgattgtggacccagccatcagctcctctggaccagctggcagctacagaccctatgatgagggactgagaagaggggtgttcatcaccaatgagacaggccagcctctgattggcaaagtgtggccaggctccacagcctttccagatttcacaaaccccacagctctggcttggtgggaagatatggtggcagagttccatgatcaggtgccctttgatggcatgtggattgacatgaatgagcccagcaacttcatcaggggctctgaggatggatgccccaacaatgaactggaaaatcctccttatgtgcctggtgttgttggagggacactgcaggcagccacaatttgtgccagctctcaccagtttctgagcacccactacaacctgcacaatctgtatggcctgactgaggccattgccagccacagggctcttgtgaaggctagaggcaccagaccttttgtgatcagcaggtccacctttgctggccatggcagatatgctggccactggactggggatgtgtggtctagttgggagcagctggctagctctgtgcctgagatcctgcagttcaacctgctgggagtgccccttgttggagcagatgtgtgtggcttcctgggcaacacctcagaggaactgtgtgtcagatggactcagctgggagcattctaccctttcatgagaaaccacaacagcctgctgagcctgcctcaagagccttacagcttttctgagccagcacagcaggccatgagaaaggccctgactctgagatatgccctgctgcctcacctgtacaccctgttccatcaggctcatgtggctggggagactgtggctagacccctgttcctggaattccccaaggacagctccacctggacagtggatcatcagctgctgtggggagaagccctgctgattacacctgtgctgcaggctggcaaggctgaagtgacaggctacttccctcttggcacttggtatgacctgcagacagtgcctgtggaagctctgggatctctgcctccacctcctgctgctcctagagagcctgccattcactctgaaggccagtgggttaccctgcctgctccactggataccatcaatgtgcatctgagagcaggctacatcatccctctgcaaggccctggcctgaccaccacagaatctagacagcagccaatggcactggctgtggccctgaccaaagggggagaagctagaggggagctgttctgggatgatggggagagcctggaagtgctggaaagaggggcctatacacaagtgatttttctggctaggaacaataccattgtgaatgagcttgtcagagtcacctctgaaggtgctggcctgcagctccagaaagtgacagtgcttggagtggccacagcaccccagcaagtgctgtctaatggggtgccagtgtccaacttcacatacagccctgataccaaggtcctggacatctgtgtgtccctgcttatgggagagcagttcctggtgtcttggtgc

SEQ ID NO: 758 - DNA, 3384 bp, synthetic construct
  source 1..3384: mol_type = other DNA
caggtccagctgcaagagtctggccccaaggtggtcaagccctctgagacactgagcctgacctgcacagtgtctggtggcagcatcagcagctactactggaactggatcagacagagccctggcaaaggcctggaatggattggctacaccaagagaggctacacagactacaaccccagcctgagaagcagagtgaccatctctgaggacaccagcaagaaccagttcagcctgaggatcagctctgtgacagctgctgacacagcagtgtactactgtgcccagatgggctggggcagccatgcctttgatatgtggggccagggcacaatggtggctgtgtccagtgggggctcaggaggaggtggctcaggaggtggaggttcaggaggggagattgtgctgacccagtctcctggcacactgtctctgagccctggggaaagagccacactgagctgtagagccagccagtctgtgtcctctagctacctggcctggtatcagcagaagcctggacaggctcccagactgctgatctatggggcctcttctagagccacaggcatccctgacagattcagtggcagtggctctggcacagacttcaccctgaccatcagcagactggaacctgaggactttgctgtgtactattgccagcagtatggcagcagcccctggacatttggacagggcaccaaggtggaaatcaaaggtggtggtggctctgcccatcctggcagacctagagctgtgcccacacagtgtgatgtgcctccaaacagcagatttgactgtgcccctgacaaggccatcacacaagagcagtgtgaagccagaggctgctgttacatccctgccaagcaaggactgcaaggggctcagatgggacagccctggtgcttcttcccaccatcttaccccagctacaagctggaaaacctgagcagctctgagatgggctacactgctacactgaccagaaccacacctacattcttcccaaaggacatcctgacactgaggctggatgtgatgatggaaacagagaacaggctgcacttcaccatcaaggaccctgccaatagaagatatgaggtgcccctggaaacccctcatgtgcactctagagccccatctccactgtactctgtggaattttctgaggaaccctttggggtcatagtcagaaggcagctggatggcagagtgctgctgaacacaactgtggcccctctgttctttgctgatcagttcctgcagctgagcaccagcctgcctagccagtatatcacaggcctggcagagcacctgtctccactgatgctgagcacatcctggaccagaatcaccctgtggaacagagacctggctcccacacctggggccaacctgtatggctctcaccccttctatctggccctggaagatggtggttcagcccatggtgtctttctgctgaactccaatgccatggatgtggtgctgcagccctctcctgctctgtcttggagaagcactggtggcatcctggatgtgtacatctttctgggccctgagcctaagtctgtggtgcagcagtacctggatgttgtgggctaccccttcatgcctccttattggggcctgggcttccacctgtgcagatggggatacagcagcacagccatcaccagacaggttgtggaaaacatgaccagagcacacttcccactggatgtgcagtggaatgacctggactacatggacagcagaagggacttcaccttcaacaaggatggcttcagagacttccctgccatggtgcaagagctgcaccaaggtggtagaagatatatgatgattgtggacccagccatcagctcctctggaccagctggcagctacagaccctatgatgagggactgagaagaggggtgttcatcaccaatgagacaggccagcctctgattggcaaagtgtggccaggctccacagcctttccagatttcacaaaccccacagctctggcttggtgggaagatatggtggcagagttccatgatcaggtgccctttgatggcatgtggattgacatgaatgagcccagcaacttcatcaggggctctgaggatggatgccccaacaatgaactggaaaatcctccttatgtgcctggtgttgttggagggacactgcaggcagccacaatttgtgccagctctcaccagtttctgagcacccactacaacctgcacaatctgtatggcctgactgaggccattgccagccacagggctcttgtgaaggctagaggcaccagaccttttgtgatcagcaggtccacctttgctggccatggcagatatgctggccactggactggggatgtgtggtctagttgggagcagctggctagctctgtgcctgagatcctgcagttcaacctgctgggagtgccccttgttggagcagatgtgtgtggcttcctgggcaacacctcagaggaactgtgtgtcagatggactcagctgggagcattctaccctttcatgagaaaccacaacagcctgctgagcctgcctcaagagccttacagcttttctgagccagcacagcaggccatgagaaaggccctgactctgagatatgccctgctgcctcacctgtacaccctgttccatcaggctcatgtggctggggagactgtggctagacccctgttcctggaattccccaaggacagctccacctggacagtggatcatcagctgctgtggggagaagccctgctgattacacctgtgctgcaggctggcaaggctgaagtgacaggctacttccctcttggcacttggtatgacctgcagacagtgcctgtggaagctctgggatctctgcctccacctcctgctgctcctagagagcctgccattcactctgaaggccagtgggttaccctgcctgctccactggataccatcaatgtgcatctgagagcaggctacatcatccctctgcaaggccctggcctgaccaccacagaatctagacagcagccaatggcactggctgtggccctgaccaaagggggagaagctagaggggagctgttctgggatgatggggagagcctggaagtgctggaaagaggggcctatacacaagtgatttttctggctaggaacaataccattgtgaatgagcttgtcagagtcacctctgaaggtgctggcctgcagctccagaaagtgacagtgcttggagtggccacagcaccccagcaagtgctgtctaatggggtgccagtgtccaacttcacatacagccctgataccaaggtcctggacatctgtgtgtccctgcttatgggagagcagttcctggtgtcttggtgc

SEQ ID NO: 759 - DNA, 720 bp, synthetic construct
  source 1..720: mol_type = other DNA
caagtccagctgcaagagtctggccccaaggtggtcaagccctctgagacactgagcctgacctgcacagtgtctggtggcagcatcagcagctactactggaactggatcagacagagccctggcaaaggactggaatggattggctacaccaagagaggctacacagactacaaccccagcctgagaagcagagtgaccatctctgaggacaccagcaagaaccagttcagcctgaggatcagctctgtgacagctgctgacacagcagtttactactgtgcccagatgggctggggcagccatgcctttgatatgtggggccagggcacaatggtggctgtgtccagtgggggctcaggaggaggtggctcaggaggtggaggttcaggaggggagattgtgctgacccagtctcctggcacactgtctctgagccctggggaaagagccacactgagctgtagagccagccagtctgtgtcctctagctacctggcctggtatcagcagaagcctggacaggctcccagactgctgatctatggggcctcttctagagccacaggcatccctgacagattcagtggcagtggctctggcacagacttcaccctgaccatcagcagactggaacctgaggactttgctgtgtactattgccagcagtatggcagcagcccctggacatttggacagggcaccaaggtggaaatcaaa

SEQ ID NO: 760 - DNA, 720 bp, synthetic construct
  source 1..720: mol_type = other DNA
caggtccagctgcaagagtctggccccaaggtggtcaagccctctgagacactgagcctgacctgcacagtgtctggtggcagcatcagcagctactactggaactggatcagacagagccctggcaaaggcctggaatggattggctacaccaagagaggctacacagactacaaccccagcctgagaagcagagtgaccatctctgaggacaccagcaagaaccagttcagcctgaggatcagctctgtgacagctgctgacacagcagtttactactgtgcccagatgggctggggcagccatgcctttgatatgtggggccagggcacaatggtggctgtgtccagtgggggctcaggaggaggtggctcaggaggtggaggttcaggaggggagattgtgctgacccagtctcctggcacactgtctctgagccctggggaaagagccacactgagctgtagagccagccagtctgtgtcctctagctacctggcctggtatcagcagaagcctggacaggctcccagactgctgatctatggggcctcttctagagccacaggcatccctgacagattcagtggcagtggctctggcacagacttcaccctgaccatcagcagactggaacctgaggactttgctgtgtactattgccagcagtatggcagcagcccctggacatttggacagggcaccaaggtggaaatcaaa

SEQ ID NO: 761 - protein, 117 aa, synthetic construct
QVQLQESGPKVVKPSETLSLTCTVSGGSISSYYWNWIRQSPGKGLEWIGYTKRGYTDYNPSLRSRVTISEDTSKNQFSLRISSVTAADTAVYYCAQMGWGSHAFDMWGQGTMVAVSS

SEQ ID NO: 762 - protein, 108 aa, synthetic construct; identical to SEQ ID NO: 406

SEQ ID NO: 763 - DNA, 4020 bp, synthetic construct; identical to SEQ ID NO: 676
  source 1..4020: mol_type = other DNA
  misc_feature 1..130: note = 130 bp AAV2 ITR-L
  misc_feature 139..238: note = mAlb SA
  misc_feature 241..564: note = H1H12847VK
  misc_feature 565..609: note = 3X G4S
  misc_feature 610..972: note = H1H112847VH
  misc_feature 973..1002: note = 2X G4S
  misc_feature 1003..3651: note = GAA
  misc_feature 3658..3884: note = SV40 polyA
  misc_feature 3891..4020: note = 130 bp AAV2 ITR-R

SEQ ID NO: 764 - DNA, 4297 bp, synthetic construct
  source 1..4297: mol_type = other DNA
  misc_feature 1..130: note = 130_bp_AAV2_ITR_-_Left
  misc_feature 139..238: note = mAlb_SA
  misc_feature 241..564: note = H1H12847 VK
  misc_feature 565..609: note = 3xG4S
  misc_feature 610..972: note = H1H12847 VH
  misc_feature 973..1002: note = 2xG4S
  misc_feature 1003..3651: note = GAA (70-952)
  misc_feature 3658..3933: note = bGHpA
  misc_feature 3935..4161: note = SV40_late_polyA
  misc_feature 4168..4297: note = 130_bp_AAV2_ITR_-_R
ctgcgcgctcgctcgctcactgaggccgcccgggcaaagcccgggcgtcgggcgacctttggtcgcccggcctcagtgagcgagcgagcgcgcagagagggagtggccaactccatcactaggggttcctagatctcttaggtcagtgaagagaagaacaaaaagcagcatattacagttagttgtcttcatcaatctttaaatatgttgtgtggtttttctctccctgtttccacagttgacatccagatgacccagagccccagctccctgtcagccagtgtgggtgacagagtgaccatcacctgcagagccagccagagcatcagcagctacctgaactggtaccagcagaaacctggcaaagcccccaagctgctgatttatgctgctagcagcctgcagagtggagtgcccagcagattctcaggcagtggctctggcacagacttcaccctgaccatctccagcctgcagccagaagactttgccacctactactgccagcagagctacagcacccctcctatcacctttggccagggcacaagactggagatcaagggaggaggaggctctggaggaggaggctctggagggggaggctctgaggtccaactggttgaatctggagggggcctggtgcaacctggcaggagcctgagactgagctgtgctgcctctggcttcacctttgatgactatgccatgaactgggtgagacaggcccctggcaagggcctggagtgggtgtctggcatcagctggagctctggcagcatggactatgcagattctgtgaagggcaggttcaccatcagcagagataatgccaagaacagcctgtacctgcagatgaacagcctcaggacagaggacacagccctgtactactgtgccaaggccagagaagtgggtgactactatggcatggatgtgtggggccagggcaccacagtgacagtgagctctgggggaggaggctcaggtgggggtggcagtgcccatcctggcagacctagagctgtgcccacacagtgtgatgtgcctccaaacagcagatttgactgtgcccctgacaaggccatcacacaagagcagtgtgaagccagaggctgctgttacatccctgccaagcaaggactgcaaggggctcagatgggacagccctggtgcttcttcccaccatcttaccccagctacaagctggaaaacctgagcagctctgagatgggctacactgctacactgaccagaaccacacctacattcttcccaaaggacatcctgacactgaggctggatgtgatgatggaaacagagaacaggctgcacttcaccatcaaggaccctgccaatagaagatatgaggtgcccctggaaacccctcatgtgcactctagagccccatctccactgtactctgtggaattttctgaggaaccctttggggtcatagtcagaaggcagctggatggcagagtgctgctgaacacaactgtggcccctctgttctttgctgatcagttcctgcagctgagcaccagcctgcctagccagtatatcacaggcctggcagagcacctgtctccactgatgctgagcacatcctggaccagaatcaccctgtggaacagagacctggctcccacacctggggccaacctgtatggctctcaccccttctatctggccctggaagatggtggttcagcccatggtgtctttctgctgaactccaatgccatggatgtggtgctgcagccctctcctgctctgtcttggagaagcactggtggcatcctggatgtgtacatctttctgggccctgagcctaagtctgtggtgcagcagtacctggatgttgtgggctaccccttcatgcctccttattggggcctgggcttccacctgtgcagatggggatacagcagcacagccatcaccagacaggttgtggaaaacatgaccagagcacacttcccactggatgtgcagtggaatgacctggactacatggacagcagaagggacttcaccttcaacaaggatggcttcagagacttccctgccatggtgcaagagctgcaccaagggggcagaagatatatgatgattgtggacccagccatcagctcctctggaccagctggcagctacagaccctatgatgagggactgagaagaggggtgttcatcaccaatgagacaggccagcctctgattggcaaagtgtggccaggctccacagcctttccagatttcacaaaccccacagctctggcttggtgggaagatatggtggcagagttccatgatcaggtgccctttgatggcatgtggattgacatgaatgagcccagcaacttcatcaggggctctgaggatggatgccccaacaatgaactggaaaatcctccttatgtgcctggtgttgttggagggacactgcaggcagccacaatttgtgccagctctcaccagtttctgagcacccactacaacctgcacaatctgtatggcctgactgaggccattgccagccacagggctcttgtgaaggctagaggcaccagaccttttgtgatcagcaggtccacctttgctggccatggcagatatgctggccactggactggggatgtgtggtctagttgggagcagctggctagctctgtgcctgagatcctgcagttcaacctgctgggagtgccccttgttggagcagatgtgtgtggcttcctgggcaacacctcagaggaactgtgtgtcagatggactcagctgggagcattctaccctttcatgagaaaccacaacagcctgctgagcctgcctcaagagccttacagcttttctgagccagcacagcaggccatgagaaaggccctgactctgagatatgccctgctgcctcacctgtacaccctgttccatcaggctcatgtggctggggagactgtggctagacccctgttcctggaattccccaaggacagctccacctggacagtggatcatcagctgctgtggggagaagccctgctgattacacctgtgctgcaggctggcaaggctgaagtgacaggctacttccctcttggcacttggtatgacctgcagacagtgcctgtggaagctctgggatctctgcctccacctcctgctgctcctagagagcctgccattcactctgaaggccagtgggttaccctgcctgctccactggataccatcaatgtgcatctgagagcaggctacatcatccctctgcaaggccctggcctgaccaccacagaatctagacagcagccaatggcactggctgtggccctgaccaaagggggagaagctagaggggagctgttctgggatgatggggagagcctggaagtgctggaaagaggggcctatacacaagtgatttttctggctaggaacaataccattgtgaatgagcttgtcagagtcacctctgaaggtgctggcctgcagctccagaaagtgacagtgcttggagtggccacagcaccccagcaagtgctgtctaatggggtgccagtgtccaacttcacatacagccctgataccaaggtcctggacatctgtgtgtccctgcttatgggagagcagttcctggtgtcttggtgctaataacctctactgtgccttctagttgccagccatctgttgtttgcccctcccccttgccttccttgaccctggaaggtgccactcccactgtcctttcctaataaaatgaggaaattgcatcacattgtctgagtaggtgtcattctattctggggggtggggtggggcaggacagcaagggggaggattgggaagacaatagcaggcatgctggggatgcagtgggctctatggcttctgaggtggaaagaaccagctggggctctagggggtatccccagacatgataagatacattgatgagtttggacaaaccacaactagaatgcagtgaaaaaaatgcttgatttgtgaaatttgtgatgctattgcttgatttgtaaccattataagctgcaataaacaagttaacaacaacaattgcattcattttatgtttcaggttcagggggaggtgtgggaggttttttaaagcaagtaaaacctctacaaatgtggtatggctgaagatctaggaacccctagtgatggagttggccactccctctctgcgcgctcgctcgctcactgaggccgggcgaccaaaggtcgcccgacgcccgggctttgcccgggcggcctcagtgagcgagcgagcgcgcag

SEQ ID NO: 765 - DNA, 4070 bp, synthetic construct
  source 1..4070: mol_type = other DNA
  misc_feature 1..130: note = 130_bp_AAV2_ITR_-_Left
  misc_feature 139..238: note = mAlb_SA
  misc_feature 241..564: note = H1H12847 VK
  misc_feature 565..609: note = 3xG4S
  misc_feature 610..972: note = H1H12847 VH
  misc_feature 973..1002: note = 2xG4S
  misc_feature 1003..3651: note = GAA (70-952)
  misc_feature 3658..3933: note = bGHpA
  misc_feature 3941..4070: note = 130_bp_AAV2_ITR_-_R
ctgcgcgctcgctcgctcactgaggccgcccgggcaaagcccgggcgtcgggcgacctttggtcgcccggcctcagtgagcgagcgagcgcgcagagagggagtggccaactccatcactaggggttcctagatctcttaggtcagtgaagagaagaacaaaaagcagcatattacagttagttgtcttcatcaatctttaaatatgttgtgtggtttttctctccctgtttccacagttgacatccagatgacccagagccccagctccctgtcagccagtgtgggtgacagagtgaccatcacctgcagagccagccagagcatcagcagctacctgaactggtaccagcagaaacctggcaaagcccccaagctgctgatttatgctgctagcagcctgcagagtggagtgcccagcagattctcaggcagtggctctggcacagacttcaccctgaccatctccagcctgcagccagaagactttgccacctactactgccagcagagctacagcacccctcctatcacctttggccagggcacaagactggagatcaagggaggaggaggctctggaggaggaggctctggagggggaggctctgaggtccaactggttgaatctggagggggcctggtgcaacctggcaggagcctgagactgagctgtgctgcctctggcttcacctttgatgactatgccatgaactgggtgagacaggcccctggcaagggcctggagtgggtgtctggcatcagctggagctctggcagcatggactatgcagattctgtgaagggcaggttcaccatcagcagagataatgccaagaacagcctgtacctgcagatgaacagcctcaggacagaggacacagccctgtactactgtgccaaggccagagaagtgggtgactactatggcatggatgtgtggggccagggcaccacagtgacagtgagctctgggggaggaggctcaggtgggggtggcagtgcccatcctggcagacctagagctgtgcccacacagtgtgatgtgcctccaaacagcagatttgactgtgcccctgacaaggccatcacacaagagcagtgtgaagccagaggctgctgttacatccctgccaagcaaggactgcaaggggctcagatgggacagccctggtgcttcttcccaccatcttaccccagctacaagctggaaaacctgagcagctctgagatgggctacactgctacactgaccagaaccacacctacattcttcccaaaggacatcctgacactgaggctggatgtgatgatggaaacagagaacaggctgcacttcaccatcaaggaccctgccaatagaagatatgaggtgcccctggaaacccctcatgtgcactctagagccccatctccactgtactctgtggaattttctgaggaaccctttggggtcatagtcagaaggcagctggatggcagagtgctgctgaacacaactgtggcccctctgttctttgctgatcagttcctgcagctgagcaccagcctgcctagccagtatatcacaggcctggcagagcacctgtctccactgatgctgagcacatcctggaccagaatcaccctgtggaacagagacctggctcccacacctggggccaacctgtatggctctcaccccttctatctggccctggaagatggtggttcagcccatggtgtctttctgctgaactccaatgccatggatgtggtgctgcagccctctcctgctctgtcttggagaagcactggtggcatcctggatgtgtacatctttctgggccctgagcctaagtctgtggtgcagcagtacctggatgttgtgggctaccccttcatgcctccttattggggcctgggcttccacctgtgcagatggggatacagcagcacagccatcaccagacaggttgtggaaaacatgaccagagcacacttcccactggatgtgcagtggaatgacctggactacatggacagcagaagggacttcaccttcaacaaggatggcttcagagacttccctgccatggtgcaagagctgcaccaagggggcagaagatatatgatgattgtggacccagccatcagctcctctggaccagctggcagctacagaccctatgatgagggactgagaagaggggtgttcatcaccaatgagacaggccagcctctgattggcaaagtgtggccaggctccacagcctttccagatttcacaaaccccacagctctggcttggtgggaagatatggtggcagagttccatgatcaggtgccctttgatggcatgtggattgacatgaatgagcccagcaacttcatcaggggctctgaggatggatgccccaacaatgaactggaaaatcctccttatgtgcctggtgttgttggagggacactgcaggcagccacaatttgtgccagctctcaccagtttctgagcacccactacaacctgcacaatctgtatggcctgactgaggccattgccagccacagggctcttgtgaaggctagaggcaccagaccttttgtgatcagcaggtccacctttgctggccatggcagatatgctggccactggactggggatgtgtggtctagttgggagcagctggctagctctgtgcctgagatcctgcagttcaacctgctgggagtgccccttgttggagcagatgtgtgtggcttcctgggcaacacctcagaggaactgtgtgtcagatggactcagctgggagcattctaccctttcatgagaaaccacaacagcctgctgagcctgcctcaagagccttacagcttttctgagccagcacagcaggccatgagaaaggccctgactctgagatatgccctgctgcctcacctgtacaccctgttccatcaggctcatgtggctggggagactgtggctagacccctgttcctggaattccccaaggacagctccacctggacagtggatcatcagctgctgtggggagaagccctgctgattacacctgtgctgcaggctggcaaggctgaagtgacaggctacttccctcttggcacttggtatgacctgcagacagtgcctgtggaagctctgggatctctgcctccacctcctgctgctcctagagagcctgccattcactctgaaggccagtgggttaccctgcctgctccactggataccatcaatgtgcatctgagagcaggctacatcatccctctgcaaggccctggcctgaccaccacagaatctagacagcagccaatggcactggctgtggccctgaccaaagggggagaagctagaggggagctgttctgggatgatggggagagcctggaagtgctggaaagaggggcctatacacaagtgatttttctggctaggaacaataccattgtgaatgagcttgtcagagtcacctctgaaggtgctggcctgcagctccagaaagtgacagtgcttggagtggccacagcaccccagcaagtgctgtctaatggggtgccagtgtccaacttcacatacagccctgataccaaggtcctggacatctgtgtgtccctgcttatgggagagcagttcctggtgtcttggtgctaataacctctactgtgccttctagttgccagccatctgttgtttgcccctcccccttgccttccttgaccctggaaggtgccactcccactgtcctttcctaataaaatgaggaaattgcatcacattgtctgagtaggtgtcattctattctggggggtggggtggggcaggacagcaagggggaggattgggaagacaatagcaggcatgctggggatgcagtgggctctatggcttctgaggtggaaagaaccagctggggctctagggggtatccccaagatctaggaacccctagtgatggagttggccactccctctctgcgcgctcgctcgctcactgaggccgggcgaccaaaggtcgcccgacgcccgggctttgcccgggcggcctcagtgagcgagcgagcgcgcag

SEQ ID NO: 766 - DNA, 4069 bp, synthetic construct
  source 1..4069: mol_type = other DNA
  misc_feature 1..130: note = 130_bp_AAV2_ITR_-_Left
  misc_feature 139..238: note = mAlb_SA
  misc_feature 241..564: note = H1H12847 VK
  misc_feature 565..609: note = 3xG4S
  misc_feature 610..972: note = H1H12847 VH
  misc_feature 973..1002: note = 2xG4S
  misc_feature 1003..3651: note = GAA (70-952)
  misc_feature 3658..3933: note = bGHpA
  misc_feature 3940..4069: note = 130_bp_AAV2_ITR_-_R
ctgcgcgctcgctcgctcactgaggccgcccgggcaaagcccgggcgtcgggcgacctttggtcgcccggcctcagtgagcgagcgagcgcgcagagagggagtggccaactccatcactaggggttcctagatctcttaggtcagtgaagagaagaacaaaaagcagcatattacagttagttgtcttcatcaatctttaaatatgttgtgtggtttttctctccctgtttccacagttgacatccagatgacccagagccccagctccctgtcagccagtgtgggtgacagagtgaccatcacctgcagagccagccagagcatcagcagctacctgaactggtaccagcagaaacctggcaaagcccccaagctgctgatttatgctgctagcagcctgcagagtggagtgcccagcagattctcaggcagtggctctggcacagacttcaccctgaccatctccagcctgcagccagaagactttgccacctactactgccagcagagctacagcacccctcctatcacctttggccagggcacaagactggagatcaagggaggaggaggctctggaggaggaggctctggagggggaggctctgaggtccaactggttgaatctggagggggcctggtgcaacctggcaggagcctgagactgagctgtgctgcctctggcttcacctttgatgactatgccatgaactgggtgagacaggcccctggcaagggcctggagtgggtgtctggcatcagctggagctctggcagcatggactatgcagattctgtgaagggcaggttcaccatcagcagagataatgccaagaacagcctgtacctgcagatgaacagcctcaggacagaggacacagccctgtactactgtgccaaggccagagaagtgggtgactactatggcatggatgtgtggggccagggcaccacagtgacagtgagctctgggggaggaggctcaggtgggggtggcagtgcccatcctggcagacctagagctgtgcccacacagtgtgatgtgcctccaaacagcagatttgactgtgcccctgacaaggccatcacacaagagcagtgtgaagccagaggctgctgttacatccctgccaagcaaggactgcaaggggctcagatgggacagccctggtgcttcttcccaccatcttaccccagctacaagctggaaaacctgagcagctctgagatgggctacactgctacactgaccagaaccacacctacattcttcccaaaggacatcctgacactgaggctggatgtgatgatggaaacagagaacaggctgcacttcaccatcaaggaccctgccaatagaagatatgaggtgcccctggaaacccctcatgtgcactctagagccccatctccactgtactctgtggaattttctgaggaaccctttggggtcatagtcagaaggcagctggatggcagagtgctgctgaacacaactgtggcccctctgttctttgctgatcagttcctgcagctgagcaccagcctgcctagccagtatatcacaggcctggcagagcacctgtctccactgatgctgagcacatcctggaccagaatcaccctgtggaacagagacctggctcccacacctggggccaacctgtatggctctcaccccttctatctggccctggaagatggtggttcagcccatggtgtctttctgctgaactccaatgccatggatgtggtgctgcagccctctcctgctctgtcttggagaagcactggtggcatcctggatgtgtacatctttctgggccctgagcctaagtctgtggtgcagcagtacctggatgttgtgggctaccccttcatgcctccttattggggcctgggcttccacctgtgcagatggggatacagcagcacagccatcaccagacaggttgtggaaaacatgaccagagcacacttcccactggatgtgcagtggaatgacctggactacatggacagcagaagggacttcaccttcaacaaggatggcttcagagacttccctgccatggtgcaagagctgcaccaaggtggtagaagatatatgatgattgtggacccagccatcagctcctctggaccagctggcagctacagaccctatgatgagggactgagaagaggggtgttcatcaccaatgagacaggccagcctctgattggcaaagtgtggccaggctccacagcctttccagatttcacaaaccccacagctctggcttggtgggaagatatggtggcagagttccatgatcaggtgccctttgatggcatgtggattgacatgaatgagcccagcaacttcatcaggggctctgaggatggatgccccaacaatgaactggaaaatcctccttatgtgcctggtgttgttggagggacactgcaggcagccacaatttgtgccagctctcaccagtttctgagcacccactacaacctgcacaatctgtatggcctgactgaggccattgccagccacagggctcttgtgaaggctagaggcaccagaccttttgtgatcagcaggtccacctttgctggccatggcagatatgctggccactggactggggatgtgtggtctagttgggagcagctggctagctctgtgcctgagatcctgcagttcaacctgctgggagtgccccttgttggagcagatgtgtgtggcttcctgggcaacacctcagaggaactgtgtgtcagatggactcagctgggagcattctaccctttcatgagaaaccacaacagcctgctgagcctgcctcaagagccttacagcttttctgagccagcacagcaggccatgagaaaggccctgactctgagatatgccctgctgcctcacctgtacaccctgttccatcaggctcatgtggctggggagactgtggctagacccctgttcctggaattccccaaggacagctccacctggacagtggatcatcagctgctgtggggagaagccctgctgattacacctgtgctgcaggctggcaaggctgaagtgacaggctacttccctcttggcacttggtatgacctgcagacagtgcctgtggaagctctgggatctctgcctccacctcctgctgctcctagagagcctgccattcactctgaaggccagtgggttaccctgcctgctccactggataccatcaatgtgcatctgagagcaggctacatcatccctctgcaaggccctggcctgaccaccacagaatctagacagcagccaatggcactggctgtggccctgaccaaaggtggagaagctagaggggagctgttctgggatgatggggagagcctggaagtgctggaaagaggggcctatacacaagtgatttttctggctaggaacaataccattgtgaatgagcttgtcagagtcacctctgaaggtgctggcctgcagctccagaaagtgacagtgcttggagtggccacagcaccccagcaagtgctgtctaatggggtgccagtgtccaacttcacatacagccctgataccaaggtcctggacatctgtgtgtccctgcttatgggagagcagttcctggtgtcttggtgctaataacctctactgtgccttctagttgccagccatctgttgtttgcccctcccccttgccttccttgaccctggaaggtgccactcccactgtcctttcctaataaaatgaggaaattgcatcacattgtctgagtaggtgtcattctattctggggggtggggtggggcaggacagcaagggggaggattgggaagacaatagcaggcatgctggggatgcagtgggctctatggcttctgaggtggaaagaaccagctggggctctagggggtatccccagatctaggaacccctagtgatggagttggccactccctctctgcgcgctcgctcgctcactgaggccgggcgaccaaaggtcgcccgacgcccgggctttgcccgggcggcctcagtgagcgagcgagcgcgcag

SEQ ID NO: 767 - DNA, 3993 bp, synthetic construct; identical to SEQ ID NO: 679
  source 1..3993: mol_type = other DNA
  misc_feature 1..130: note = 130 bp AAV2 ITR-L
  misc_feature 139..238: note = mAlb SA
  misc_feature 241..591: note = 12450 VH anti-CD63
  misc_feature 592..636: note = 3X G4S linker
  misc_feature 637..960: note = 3-20 ULC light chain VL
  misc_feature 961..975: note = 1X G4S linker
  misc_feature 976..3624: note = GAA CpG
  misc_feature 3631..3857: note = SV40 polyA
  misc_feature 3864..3993: note = 130 bp AAV2 ITR-R

SEQ ID NO: 768 - DNA, 4270 bp, synthetic construct
  source 1..4270: mol_type = other DNA
  misc_feature 1..130: note = 130_bp_AAV2_ITR_-_Left
  misc_feature 139..238: note = mAlb_SA
  misc_feature 241..3624: note = 12450 anti-CD63 scFv:GAA
  misc_feature 3631..3906: note = bGHpA
  misc_feature 3908..4134: note = SV40_late_polyA
  misc_feature 4141..4270: note = 130_bp_AAV2_ITR_-_R
ctgcgcgctcgctcgctcactgaggccgcccgggcaaagcccgggcgtcgggcgacctttggtcgcccggcctcagtgagcgagcgagcgcgcagagagggagtggccaactccatcactaggggttcctagatctcttaggtcagtgaagagaagaacaaaaagcagcatattacagttagttgtcttcatcaatctttaaatatgttgtgtggtttttctctccctgtttccacagttcaggtccagctgcaagagtctggccccaaggtggtcaagccctctgagacactgagcctgacctgcacagtgtctggtggcagcatcagcagctactactggaactggatcagacagagccctggcaaaggcctggaatggattggctacaccaagagaggctacacagactacaaccccagcctgagaagcagagtgaccatctctgaggacaccagcaagaaccagttcagcctgaggatcagctctgtgacagctgctgacacagcagtttactactgtgcccagatgggctggggcagccatgcctttgatatgtggggccagggcacaatggtggctgtgtccagtgggggctcaggaggaggtggctcaggaggtggaggttcaggaggggagattgtgctgacccagtctcctggcacactgtctctgagccctggggaaagagccacactgagctgtagagccagccagtctgtgtcctctagctacctggcctggtatcagcagaagcctggacaggctcccagactgctgatctatggggcctcttctagagccacaggcatccctgacagattcagtggcagtggctctggcacagacttcaccctgaccatcagcagactggaacctgaggactttgctgtgtactattgccagcagtatggcagcagcccctggacatttggacagggcaccaaggtggaaatcaaagggggtggtggctctgcccatcctggcagacctagagctgtgcccacacagtgtgatgtgcctccaaacagcagatttgactgtgcccctgacaaggccatcacacaagagcagtgtgaagccagaggctgctgttacatccctgccaagcaaggactgcaaggggctcagatgggacagccctggtgcttcttcccaccatcttaccccagctacaagctggaaaacctgagcagctctgagatgggctacactgctacactgaccagaaccacacctacattcttcccaaaggacatcctgacactgaggctggatgtgatgatggaaacagagaacaggctgcacttcaccatcaaggaccctgccaatagaagatatgaggtgcccctggaaacccctcatgtgcactctagagccccatctccactgtactctgtggaattttctgaggaaccctttggggtcatagtcagaaggcagctggatggcagagtgctgctgaacacaactgtggcccctctgttctttgctgatcagttcctgcagctgagcaccagcctgcctagccagtatatcacaggcctggcagagcacctgtctccactgatgctgagcacatcctggaccagaatcaccctgtggaacagagacctggctcccacacctggggccaacctgtatggctctcaccccttctatctggccctggaagatggtggttcagcccatggtgtctttctgctgaactccaatgccatggatgtggtgctgcagccctctcctgctctgtcttggagaagcactggtggcatcctggatgtgtacatctttctgggccctgagcctaagtctgtggtgcagcagtacctggatgttgtgggctaccccttcatgcctccttattggggcctgggcttccacctgtgcagatggggatacagcagcacagccatcaccagacaggttgtggaaaacatgaccagagcacacttcccactggatgtgcagtggaatgacctggactacatggacagcagaagggacttcaccttcaacaaggatggcttcagagacttccctgccatggtgcaagagctgcaccaagggggcagaagatatatgatgattgtggacccagccatcagctcctctggaccagctggcagctacagaccctatgatgagggactgagaagaggggtgttcatcaccaatgagacaggccagcctctgattggcaaagtgtggccaggctccacagcctttccagatttcacaaaccccacagctctggcttggtgggaagatatggtggcagagttccatgatcaggtgccctttgatggcatgtggattgacatgaatgagcccagcaacttcatcaggggctctgaggatggatgccccaacaatgaactggaaaatcctccttatgtgcctggtgttgttggagggacactgcaggcagccacaatttgtgccagctctcaccagtttctgagcacccactacaacctgcacaatctgtatggcctgactgaggccattgccagccacagggctcttgtgaaggctagaggcaccagaccttttgtgatcagcaggtccacctttgctggccatggcagatatgctggccactggactggggatgtgtggtctagttgggagcagctggctagctctgtgcctgagatcctgcagttcaacctgctgggagtgccccttgttggagcagatgtgtgtggcttcctgggcaacacctcagaggaactgtgtgtcagatggactcagctgggagcattctaccctttcatgagaaaccacaacagcctgctgagcctgcctcaagagccttacagcttttctgagccagcacagcaggccatgagaaaggccctgactctgagatatgccctgctgcctcacctgtacaccctgttccatcaggctcatgtggctggggagactgtggctagacccctgttcctggaattccccaaggacagctccacctggacagtggatcatcagctgctgtggggagaagccctgctgattacacctgtgctgcaggctggcaaggctgaagtgacaggctacttccctcttggcacttggtatgacctgcagacagtgcctgtggaagctctgggatctctgcctccacctcctgctgctcctagagagcctgccattcactctgaaggccagtgggttaccctgcctgctccactggataccatcaatgtgcatctgagagcaggctacatcatccctctgcaaggccctggcctgaccaccacagaatctagacagcagccaatggcactggctgtggccctgaccaaagggggagaagctagaggggagctgttctgggatgatggggagagcctggaagtgctggaaagaggggcctatacacaagtgatttttctggctaggaacaataccattgtgaatgagcttgtcagagtcacctctgaaggtgctggcctgcagctccagaaagtgacagtgcttggagtggccacagcaccccagcaagtgctgtctaatggggtgccagtgtccaacttcacatacagccctgataccaaggtcctggacatctgtgtgtccctgcttatgggagagcagttcctggtgtcttggtgctaataacctctactgtgccttctagttgccagccatctgttgtttgcccctcccccttgccttccttgaccctggaaggtgccactcccactgtcctttcctaataaaatgaggaaattgcatcacattgtctgagtaggtgtcattctattctggggggtggggtggggcaggacagcaagggggaggattgggaagacaatagcaggcatgctggggatgcagtgggctctatggcttctgaggtggaaagaaccagctggggctctagggggtatccccagacatgataagatacattgatgagtttggacaaaccacaactagaatgcagtgaaaaaaatgcttgatttgtgaaatttgtgatgctattgcttgatttgtaaccattataagctgcaataaacaagttaacaacaacaattgcattcattttatgtttcaggttcagggggaggtgtgggaggttttttaaagcaagtaaaacctctacaaatgtggtatggctgaagatctaggaacccctagtgatggagttggccactccctctctgcgcgctcgctcgctcactgaggccgggcgaccaaaggtcgcccgacgcccgggctttgcccgggcggcctcagtgagcgagcgagcgcgcag

SEQ ID NO: 769 - DNA, 4042 bp, synthetic construct
  source 1..4042: mol_type = other DNA
  misc_feature 1..130: note = 130bp AAV2 ITR L
  misc_feature 139..238: note = mAlb SA
  misc_feature 241..3624: note = 12450 anti-CD63 scFv:GAA
  misc_feature 3631..3906: note = bGH pA
  misc_feature 3913..4042: note = 130bp AAV2 ITR R
ctgcgcgctcgctcgctcactgaggccgcccgggcaaagcccgggcgtcgggcgacctttggtcgcccggcctcagtgagcgagcgagcgcgcagagagggagtggccaactccatcactaggggttcctagatctcttaggtcagtgaagagaagaacaaaaagcagcatattacagttagttgtcttcatcaatctttaaatatgttgtgtggtttttctctccctgtttccacagttcaggtccagctgcaagagtctggccccaaggtggtcaagccctctgagacactgagcctgacctgcacagtgtctggtggcagcatcagcagctactactggaactggatcagacagagccctggcaaaggcctggaatggattggctacaccaagagaggctacacagactacaaccccagcctgagaagcagagtgaccatctctgaggacaccagcaagaaccagttcagcctgaggatcagctctgtgacagctgctgacacagcagtttactactgtgcccagatgggctggggcagccatgcctttgatatgtggggccagggcacaatggtggctgtgtccagtgggggctcaggaggaggtggctcaggaggtggaggttcaggaggggagattgtgctgacccagtctcctggcacactgtctctgagccctggggaaagagccacactgagctgtagagccagccagtctgtgtcctctagctacctggcctggtatcagcagaagcctggacaggctcccagactgctgatctatggggcctcttctagagccacaggcatccctgacagattcagtggcagtggctctggcacagacttcaccctgaccatcagcagactggaacctgaggactttgctgtgtactattgccagcagtatggcagcagcccctggacatttggacagggcaccaaggtggaaatcaaagggggtggtggctctgcccatcctggcagacctagagctgtgcccacacagtgtgatgtgcctccaaacagcagatttgactgtgcccctgacaaggccatcacacaagagcagtgtgaagccagaggctgctgttacatccctgccaagcaaggactgcaaggggctcagatgggacagccctggtgcttcttcccaccatcttaccccagctacaagctggaaaacctgagcagctctgagatgggctacactgctacactgaccagaaccacacctacattcttcccaaaggacatcctgacactgaggctggatgtgatgatggaaacagagaacaggctgcacttcaccatcaaggaccctgccaatagaagatatgaggtgcccctggaaacccctcatgtgcactctagagccccatctccactgtactctgtggaattttctgaggaaccctttggggtcatagtcagaaggcagctggatggcagagtgctgctgaacacaactgtggcccctctgttctttgctgatcagttcctgcagctgagcaccagcctgcctagccagtatatcacaggcctggcagagcacctgtctccactgatgctgagcacatcctggaccagaatcaccctgtggaacagagacctggctcccacacctggggccaacctgtatggctctcaccccttctatctggccctggaagatggtggttcagcccatggtgtctttctgctgaactccaatgccatggatgtggtgctgcagccctctcctgctctgtcttggagaagcactggtggcatcctggatgtgtacatctttctgggccctgagcctaagtctgtggtgcagcagtacctggatgttgtgggctaccccttcatgcctccttattggggcctgggcttccacctgtgcagatggggatacagcagcacagccatcaccagacaggttgtggaaaacatgaccagagcacacttcccactggatgtgcagtggaatgacctggactacatggacagcagaagggacttcaccttcaacaaggatggcttcagagacttccctgccatggtgcaagagctgcaccaagggggcagaagatatatgatgattgtggacccagccatcagctcctctggaccagctggcagctacagaccctatgatgagggactgagaagaggggtgttcatcaccaatgagacaggccagcctctgattggcaaagtgtggccaggctccacagcctttccagatttcacaaaccccacagctctggcttggtgggaagatatggtggcagagttccatgatcaggtgccctttgatggcatgtggattgacatgaatgagcccagcaacttcatcaggggctctgaggatggatgccccaacaatgaactggaaaatcctccttatgtgcctggtgttgttggagggacactgcaggcagccacaatttgtgccagctctcaccagtttctgagcacccactacaacctgcacaatctgtatggcctgactgaggccattgccagccacagggctcttgtgaaggctagaggcaccagaccttttgtgatcagcaggtccacctttgctggccatggcagatatgctggccactggactggggatgtgtggtctagttgggagcagctggctagctctgtgcctgagatcctgcagttcaacctgctgggagtgccccttgttggagcagatgtgtgtggcttcctgggcaacacctcagaggaactgtgtgtcagatggactcagctgggagcattctaccctttcatgagaaaccacaacagcctgctgagcctgcctcaagagccttacagcttttctgagccagcacagcaggccatgagaaaggccctgactctgagatatgccctgctgcctcacctgtacaccctgttccatcaggctcatgtggctggggagactgtggctagacccctgttcctggaattccccaaggacagctccacctggacagtggatcatcagctgctgtggggagaagccctgctgattacacctgtgctgcaggctggcaaggctgaagtgacaggctacttccctcttggcacttggtatgacctgcagacagtgcctgtggaagctctgggatctctgcctccacctcctgctgctcctagagagcctgccattcactctgaaggccagtgggttaccctgcctgctccactggataccatcaatgtgcatctgagagcaggctacatcatccctctgcaaggccctggcctgaccaccacagaatctagacagcagccaatggcactggctgtggccctgaccaaagggggagaagctagaggggagctgttctgggatgatggggagagcctggaagtgctggaaagaggggcctatacacaagtgatttttctggctaggaacaataccattgtgaatgagcttgtcagagtcacctctgaaggtgctggcctgcagctccagaaagtgacagtgcttggagtggccacagcaccccagcaagtgctgtctaatggggtgccagtgtccaacttcacatacagccctgataccaaggtcctggacatctgtgtgtccctgcttatgggagagcagttcctggtgtcttggtgctaataacctctactgtgccttctagttgccagccatctgttgtttgcccctcccccttgccttccttgaccctggaaggtgccactcccactgtcctttcctaataaaatgaggaaattgcatcacattgtctgagtaggtgtcattctattctggggggtggggtggggcaggacagcaagggggaggattgggaagacaatagcaggcatgctggggatgcagtgggctctatggcttctgaggtggaaagaaccagctggggctctagggggtatccccagatctaggaacccctagtgatggagttggccactccctctctgcgcgctcgctcgctcactgaggccgggcgaccaaaggtcgcccgacgcccgggctttgcccgggcggcctcagtgagcgagcgagcgcgcag

SEQ ID NO: 770 - DNA, 4269 bp, synthetic construct
  source 1..4269: mol_type = other DNA
  misc_feature 1..130: note = 130_bp_AAV2_ITR_-_Left
  misc_feature 139..238: note = mAlb_SA
  misc_feature 241..3624: note = 12450 anti-CD63 scFv:GAA
  misc_feature 3631..3906: note = bGH_pA
  misc_feature 3907..4133: note = SV40_late_polyA
  misc_feature 4140..4269: note = 130_bp_AAV2_ITR_-_R
ctgcgcgctcgctcgctcactgaggccgcccgggcaaagcccgggcgtcgggcgacctttggtcgcccggcctcagtgagcgagcgagcgcgcagagagggagtggccaactccatcactaggggttcctagatctcttaggtcagtgaagagaagaacaaaaagcagcatattacagttagttgtcttcatcaatctttaaatatgttgtgtggtttttctctccctgtttccacagttcaggtccagctgcaagagtctggccccaaggtggtcaagccctctgagacactgagcctgacctgcacagtgtctggtggcagcatcagcagctactactggaactggatcagacagagccctggcaaaggcctggaatggattggctacaccaagagaggctacacagactacaaccccagcctgagaagcagagtgaccatctctgaggacaccagcaagaaccagttcagcctgaggatcagctctgtgacagctgctgacacagcagtgtactactgtgcccagatgggctggggcagccatgcctttgatatgtggggccagggcacaatggtggctgtgtccagtgggggctcaggaggaggtggctcaggaggtggaggttcaggaggggagattgtgctgacccagtctcctggcacactgtctctgagccctggggaaagagccacactgagctgtagagccagccagtctgtgtcctctagctacctggcctggtatcagcagaagcctggacaggctcccagactgctgatctatggggcctcttctagagccacaggcatccctgacagattcagtggcagtggctctggcacagacttcaccctgaccatcagcagactggaacctgaggactttgctgtgtactattgccagcagtatggcagcagcccctggacatttggacagggcaccaaggtggaaatcaaaggtggtggtggctctgcccatcctggcagacctagagctgtgcccacacagtgtgatgtgcctccaaacagcagatttgactgtgcccctgacaaggccatcacacaagagcagtgtgaagccagaggctgctgttacatccctgccaagcaaggactgcaaggggctcagatgggacagccctggtgcttcttcccaccatcttaccccagctacaagctggaaaacctgagcagctctgagatgggctacactgctacactgaccagaaccacacctacattcttcccaaaggacatcctgacactgaggctggatgtgatgatggaaacagagaacaggctgcacttcaccatcaaggaccctgccaatagaagatatgaggtgcccctggaaacccctcatgtgcactctagagccccatctccactgtactctgtggaattttctgaggaaccctttggggtcatagtcagaaggcagctggatggcagagtgctgctgaacacaactgtggcccctctgttctttgctgatcagttcctgcagctgagcaccagcctgcctagccagtatatcacaggcctggcagagcacctgtctccactgatgctgagcacatcctggaccagaatcaccctgtggaacagagacctggctcccacacctggggccaacctgtatggctctcaccccttctatctggccctggaagatggtggttcagcccatggtgtctttctgctgaactccaatgccatggatgtggtgctgcagccctctcctgctctgtcttggagaagcactggtggcatcctggatgtgtacatctttctgggccctgagcctaagtctgtggtgcagcagtacctggatgttgtgggctaccccttcatgcctccttattggggcctgggcttccacctgtgcagatggggatacagcagcacagccatcaccagacaggttgtggaaaacatgaccagagcacacttcccactggatgtgcagtggaatgacctggactacatggacagcagaagggacttcaccttcaacaaggatggcttcagagacttccctgccatggtgcaagagctgcaccaaggtggtagaagatatatgatgattgtggacccagccatcagctcctctggaccagctggcagctacagaccctatgatgagggactgagaagaggggtgttcatcaccaatgagacaggccagcctctgattggcaaagtgtggccaggctccacagcctttccagatttcacaaaccccacagctctggcttggtgggaagatatggtggcagagttccatgatcaggtgccctttgatggcatgtggattgacatgaatgagcccagcaacttcatcaggggctctgaggatggatgccccaacaatgaactggaaaatcctccttatgtgcctggtgttgttggagggacactgcaggcagccacaatttgtgccagctctcaccagtttctgagcacccactacaacctgcacaatctgtatggcctgactgaggccattgccagccacagggctcttgtgaaggctagaggcaccagaccttttgtgatcagcaggtccacctttgctggccatggcagatatgctggccactggactggggatgtgtggtctagttgggagcagctggctagctctgtgcctgagatcctgcagttcaacctgctgggagtgccccttgttggagcagatgtgtgtggcttcctgggcaacacctcagaggaactgtgtgtcagatggactcagctgggagcattctaccctttcatgagaaaccacaacagcctgctgagcctgcctcaagagccttacagcttttctgagccagcacagcaggccatgagaaaggccctgactctgagatatgccctgctgcctcacctgtacaccctgttccatcaggctcatgtggctggggagactgtggctagacccctgttcctggaattccccaaggacagctccacctggacagtggatcatcagctgctgtggggagaagccctgctgattacacctgtgctgcaggctggcaaggctgaagtgacaggctacttccctcttggcacttggtatgacctgcagacagtgcctgtggaagctctgggatctctgcctccacctcctgctgctcctagagagcctgccattcactctgaaggccagtgggttaccctgcctgctccactggataccatcaatgtgcatctgagagcaggctacatcatccctctgcaaggccctggcctgaccaccacagaatctagacagcagccaatggcactggctgtggccctgaccaaagggggagaagctagaggggagctgttctgggatgatggggagagcctggaagtgctggaaagaggggcctatacacaagtgatttttctggctaggaacaataccattgtgaatgagcttgtcagagtcacctctgaaggtgctggcctgcagctccagaaagtgacagtgcttggagtggccacagcaccccagcaagtgctgtctaatggggtgccagtgtccaacttcacatacagccctgataccaaggtcctggacatctgtgtgtccctgcttatgggagagcagttcctggtgtcttggtgctaataacctctactgtgccttctagttgccagccatctgttgtttgcccctcccccttgccttccttgaccctggaaggtgccactcccactgtcctttcctaataaaatgaggaaattgcatcacattgtctgagtaggtgtcattctattctggggggtggggtggggcaggacagcaagggggaggattgggaagacaatagcaggcatgctggggatgcagtgggctctatggcttctgaggtggaaagaaccagctggggctctagggggtatccccgacatgataagatacattgatgagtttggacaaaccacaactagaatgcagtgaaaaaaatgcttgatttgtgaaatttgtgatgctattgcttgatttgtaaccattataagctgcaataaacaagttaacaacaacaattgcattcattttatgtttcaggttcagggggaggtgtgggaggttttttaaagcaagtaaaacctctacaaatgtggtatggctgaagatctaggaacccctagtgatggagttggccactccctctctgcgcgctcgctcgctcactgaggccgggcgaccaaaggtcgcccgacgcccgggctttgcccgggcggcctcagtgagcgagcgagcgcgcag

SEQ ID NO: 771 - DNA, 4042 bp, synthetic construct
  source 1..4042: mol_type = other DNA
  misc_feature 1..130: note = 130_bp_AAV2_ITR_-_Left
  misc_feature 139..238: note = mAlb_SA
  misc_feature 241..3624: note = 12450 anti-CD63 scFv:GAA
  misc_feature 3631..3906: note = bGH_pA
  misc_feature 3913..4042: note = 130_bp_AAV2_ITR_-_R
ctgcgcgctcgctcgctcactgaggccgcccgggcaaagcccgggcgtcgggcgacctttggtcgcccggcctcagtgagcgagcgagcgcgcagagagggagtggccaactccatcactaggggttcctagatctcttaggtcagtgaagagaagaacaaaaagcagcatattacagttagttgtcttcatcaatctttaaatatgttgtgtggtttttctctccctgtttccacagttcaggtccagctgcaagagtctggccccaaggtggtcaagccctctgagacactgagcctgacctgcacagtgtctggtggcagcatcagcagctactactggaactggatcagacagagccctggcaaaggcctggaatggattggctacaccaagagaggctacacagactacaaccccagcctgagaagcagagtgaccatctctgaggacaccagcaagaaccagttcagcctgaggatcagctctgtgacagctgctgacacagcagtgtactactgtgcccagatgggctggggcagccatgcctttgatatgtggggccagggcacaatggtggctgtgtccagtgggggctcaggaggaggtggctcaggaggtggaggttcaggaggggagattgtgctgacccagtctcctggcacactgtctctgagccctggggaaagagccacactgagctgtagagccagccagtctgtgtcctctagctacctggcctggtatcagcagaagcctggacaggctcccagactgctgatctatggggcctcttctagagccacaggcatccctgacagattcagtggcagtggctctggcacagacttcaccctgaccatcagcagactggaacctgaggactttgctgtgtactattgccagcagtatggcagcagcccctggacatttggacagggcaccaaggtggaaatcaaaggtggtggtggctctgcccatcctggcagacctagagctgtgcccacacagtgtgatgtgcctccaaacagcagatttgactgtgcccctgacaaggccatcacacaagagcagtgtgaagccagaggctgctgttacatccctgccaagcaaggactgcaaggggctcagatgggacagccctggtgcttcttcccaccatcttaccccagctacaagctggaaaacctgagcagctctgagatgggctacactgctacactgaccagaaccacacctacattcttcccaaaggacatcctgacactgaggctggatgtgatgatggaaacagagaacaggctgcacttcaccatcaaggaccctgccaatagaagatatgaggtgcccctggaaacccctcatgtgcactctagagccccatctccactgtactctgtggaattttctgaggaaccctttggggtcatagtcagaaggcagctggatggcagagtgctgctgaacacaactgtggcccctctgttctttgctgatcagttcctgcagctgagcaccagcctgcctagccagtatatcacaggcctggcagagcacctgtctccactgatgctgagcacatcctggaccagaatcaccctgtggaacagagacctggctcccacacctggggccaacctgtatggctctcaccccttctatctggccctggaagatggtggttcagcccatggtgtctttctgctgaactccaatgccatggatgtggtgctgcagccctctcctgctctgtcttggagaagcactggtggcatcctggatgtgtacatctttctgggccctgagcctaagtctgtggtgcagcagtacctggatgttgtgggctaccccttcatgcctccttattggggcctgggcttccacctgtgcagatggggatacagcagcacagccatcaccagacaggttgtggaaaacatgaccagagcacacttcccactggatgtgcagtggaatgacctggactacatggacagcagaagggacttcaccttcaacaaggatggcttcagagacttccctgccatggtgcaagagctgcaccaaggtggtagaagatatatgatgattgtggacccagccatcagctcctctggaccagctggcagctacagaccctatgatgagggactgagaagaggggtgttcatcaccaatgagacaggccagcctctgattggcaaagtgtggccaggctccacagcctttccagatttcacaaaccccacagctctggcttggtgggaagatatggtggcagagttccatgatcaggtgccctttgatggcatgtggattgacatgaatgagcccagcaacttcatcaggggctctgaggatggatgccccaacaatgaactggaaaatcctccttatgtgcctggtgttgttggagggacactgcaggcagccacaatttgtgccagctctcaccagtttctgagcacccactacaacctgcacaatctgtatggcctgactgaggccattgccagccacagggctcttgtgaaggctagaggcaccagaccttttgtgatcagcaggtccacctttgctggccatggcagatatgctggccactggactggggatgtgtggtctagttgggagcagctggctagctctgtgcctgagatcctgcagttcaacctgctgggagtgccccttgttggagcagatgtgtgtggcttcctgggcaacacctcagaggaactgtgtgtcagatggactcagctgggagcattctaccctttcatgagaaaccacaacagcctgctgagcctgcctcaagagccttacagcttttctgagccagcacagcaggccatgagaaaggccctgactctgagatatgccctgctgcctcacctgtacaccctgttccatcaggctcatgtggctggggagactgtggctagacccctgttcctggaattccccaaggacagctccacctggacagtggatcatcagctgctgtggggagaagccctgctgattacacctgtgctgcaggctggcaaggctgaagtgacaggctacttccctcttggcacttggtatgacctgcagacagtgcctgtggaagctctgggatctctgcctccacctcctgctgctcctagagagcctgccattcactctgaaggccagtgggttaccctgcctgctccactggataccatcaatgtgcatctgagagcaggctacatcatccctctgcaaggccctggcctgaccaccacagaatctagacagcagccaatggcactggctgtggccctgaccaaagggggagaagctagaggggagctgttctgggatgatggggagagcctggaagtgctggaaagaggggcctatacacaagtgatttttctggctaggaacaataccattgtgaatgagcttgtcagagtcacctctgaaggtgctggcctgcagctccagaaagtgacagtgcttggagtggccacagcaccccagcaagtgctgtctaatggggtgccagtgtccaacttcacatacagccctgataccaaggtcctggacatctgtgtgtccctgcttatgggagagcagttcctggtgtcttggtgctaataacctctactgtgccttctagttgccagccatctgttgtttgcccctcccccttgccttccttgaccctggaaggtgccactcccactgtcctttcctaataaaatgaggaaattgcatcacattgtctgagtaggtgtcattctattctggggggtggggtggggcaggacagcaagggggaggattgggaagacaatagcaggcatgctggggatgcagtgggctctatggcttctgaggtggaaagaaccagctggggctctagggggtatccccagatctaggaacccctagtgatggagttggccactccctctctgcgcgctcgctcgctcactgaggccgggcgaccaaaggtcgcccgacgcccgggctttgcccgggcggcctcagtgagcgagcgagcgcgcag

SEQ ID NO: 772 - DNA, 4042 bp, synthetic construct
  source 1..4042: mol_type = other DNA
  misc_feature 1..130: note = 130_bp_AAV2_ITR_-_Left
  misc_feature 139..238: note = mAlb_SA
  misc_feature 241..3624: note = 12450 anti-CD63 scFv:GAA
  misc_feature 3631..3906: note = bGH_pA
  misc_feature 3913..4042: note = 130_bp_AAV2_ITR_-_R
ctgcgcgctcgctcgctcactgaggccgcccgggcaaagcccgggcgtcgggcgacctttggtcgcccggcctcagtgagcgagcgagcgcgcagagagggagtggccaactccatcactaggggttcctagatctcttaggtcagtgaagagaagaacaaaaagcagcatattacagttagttgtcttcatcaatctttaaatatgttgtgtggtttttctctccctgtttccacagttcaggtccagctgcaagagtctggccccaaggtggtcaagccctctgagacactgagcctgacctgcacagtgtctggtggcagcatcagcagctactactggaactggatcagacagagccctggcaaaggcctggaatggattggctacaccaagagaggctacacagactacaaccccagcctgagaagcagagtgaccatctctgaggacaccagcaagaaccagttcagcctgaggatcagctctgtgacagctgctgacacagcagtgtactactgtgcccagatgggctggggcagccatgcctttgatatgtggggccagggcacaatggtggctgtgtccagtgggggctcaggaggaggtggctcaggaggtggaggttcaggaggggagattgtgctgacccagtctcctggcacactgtctctgagccctggggaaagagccacactgagctgtagagccagccagtctgtgtcctctagctacctggcctggtatcagcagaagcctggacaggctcccagactgctgatctatggggcctcttctagagccacaggcatccctgacagattcagtggcagtggctctggcacagacttcaccctgaccatcagcagactggaacctgaggactttgctgtgtactattgccagcagtatggcagcagcccctggacatttggacagggcaccaaggtggaaatcaaaggtggtggtggctctgcccatcctggcagacctagagctgtgcccacacagtgtgatgtgcctccaaacagcagatttgactgtgcccctgacaaggccatcacacaagagcagtgtgaagccagaggctgctgttacatccctgccaagcaaggactgcaaggggctcagatgggacagccctggtgcttcttcccaccatcttaccccagctacaagctggaaaacctgagcagctctgagatgggctacactgctacactgaccagaaccacacctacattcttcccaaaggacatcctgacactgaggctggatgtgatgatggaaacagagaacaggctgcacttcaccatcaaggaccctgccaatagaagatatgaggtgcccctggaaacccctcatgtgcactctagagccccatctccactgtactctgtggaattttctgaggaaccctttggggtcatagtcagaaggcagctggatggcagagtgctgctgaacacaactgtggcccctctgttctttgctgatcagttcctgcagctgagcaccagcctgcctagccagtatatcacaggcctggcagagcacctgtctccactgatgctgagcacatcctggaccagaatcaccctgtggaacagagacctggctcccacacctggggccaacctgtatggctctcaccccttctatctggccctggaagatggtggttcagcccatggtgtctttctgctgaactccaatgccatggatgtggtgctgcagccctctcctgctctgtcttggagaagcactggtggcatcctggatgtgtacatctttctgggccctgagcctaagtctgtggtgcagcagtacctggatgttgtgggctaccccttcatgcctccttattggggcctgggcttccacctgtgcagatggggatacagcagcacagccatcaccagacaggttgtggaaaacatgaccagagcacacttcccactggatgtgcagtggaatgacctggactacatggacagcagaagggacttcaccttcaacaaggatggcttcagagacttccctgccatggtgcaagagctgcaccaaggtggtagaagatatatgatgattgtggacccagccatcagctcctctggaccagctggcagctacagaccctatgatgagggactgagaagaggggtgttcatcaccaatgagacaggccagcctctgattggcaaagtgtggccaggctccacagcctttccagatttcacaaaccccacagctctggcttggtgggaagatatggtggcagagttccatgatcaggtgccctttgatggcatgtggattgacatgaatgagcccagcaacttcatcaggggctctgaggatggatgccccaacaatgaactggaaaatcctccttatgtgcctggtgttgttggagggacactgcaggcagccacaatttgtgccagctctcaccagtttctgagcacccactacaacctgcacaatctgtatggcctgactgaggccattgccagccacagggctcttgtgaaggctagaggcaccagaccttttgtgatcagcaggtccacctttgctggccatggcagatatgctggccactggactggggatgtgtggtctagttgggagcagctggctagctctgtgcctgagatcctgcagttcaacctgctgggagtgccccttgttggagcagatgtgtgtggcttcctgggcaacacctcagaggaactgtgtgtcagatggactcagctgggagcattctaccctttcatgagaaaccacaacagcctgctgagcctgcctcaagagccttacagcttttctgagccagcacagcaggccatgagaaaggccctgactctgagatatgccctgctgcctcacctgtacaccctgttccatcaggctcatgtggctggggagactgtggctagacccctgttcctggaattccccaaggacagctccacctggacagtggatcatcagctgctgtggggagaagccctgctgattacacctgtgctgcaggctggcaaggctgaagtgacaggctacttccctcttggcacttggtatgacctgcagacagtgcctgtggaagctctgggatctctgcctccacctcctgctgctcctagagagcctgccattcactctgaaggccagtgggttaccctgcctgctccactggataccatcaatgtgcatctgagagcaggctacatcatccctctgcaaggccctggcctgaccaccacagaatctagacagcagccaatggcactggctgtggccctgaccaaaggtggagaagctagaggggagctgttctgggatgatggggagagcctggaagtgctggaaagaggggcctatacacaagtgatttttctggctaggaacaataccattgtgaatgagcttgtcagagtcacctctgaaggtgctggcctgcagctccagaaagtgacagtgcttggagtggccacagcaccccagcaagtgctgtctaatggggtgccagtgtccaacttcacatacagccctgataccaaggtcctggacatctgtgtgtccctgcttatgggagagcagttcctggtgtcttggtgctaataacctctactgtgccttctagttgccagccatctgttgtttgcccctcccccttgccttccttgaccctggaaggtgccactcccactgtcctttcctaataaaatgaggaaattgcatcacattgtctgagtaggtgtcattctattctggggggtggggtggggcaggacagcaagggggaggattgggaagacaatagcaggcatgctggggatgcagtgggctctatggcttctgaggtggaaagaaccagctggggctctagggggtatccccagatctaggaacccctagtgatggagttggccactccctctctgcgcgctcgctcgctcactgaggccgggcgaccaaaggtcgcccgacgcccgggctttgcccgggcggcctcagtgagcgagcgagcgcgcag

SEQ ID NO: 773 - DNA, 4091 bp, synthetic construct
  source 1..4091: mol_type = other DNA
  misc_feature 1..130: note = 130_bp_AAV2_ITR_-_Left
  misc_feature 139..238: note = mAlb SA
  misc_feature 241..3624: note = 12450 anti-CD63 scFv:GAA_
  misc_feature 3631..3906: note = bGH pA
  misc_feature 3907..3955: note = sPA
  misc_feature 3962..4091: note = 130_bp_AAV2_ITR_-_R
ctgcgcgctcgctcgctcactgaggccgcccgggcaaagcccgggcgtcgggcgacctttggtcgcccggcctcagtgagcgagcgagcgcgcagagagggagtggccaactccatcactaggggttcctagatctcttaggtcagtgaagagaagaacaaaaagcagcatattacagttagttgtcttcatcaatctttaaatatgttgtgtggtttttctctccctgtttccacagttcaggtccagctgcaagagtctggccccaaggtggtcaagccctctgagacactgagcctgacctgcacagtgtctggtggcagcatcagcagctactactggaactggatcagacagagccctggcaaaggcctggaatggattggctacaccaagagaggctacacagactacaaccccagcctgagaagcagagtgaccatctctgaggacaccagcaagaaccagttcagcctgaggatcagctctgtgacagctgctgacacagcagtgtactactgtgcccagatgggctggggcagccatgcctttgatatgtggggccagggcacaatggtggctgtgtccagtgggggctcaggaggaggtggctcaggaggtggaggttcaggaggggagattgtgctgacccagtctcctggcacactgtctctgagccctggggaaagagccacactgagctgtagagccagccagtctgtgtcctctagctacctggcctggtatcagcagaagcctggacaggctcccagactgctgatctatggggcctcttctagagccacaggcatccctgacagattcagtggcagtggctctggcacagacttcaccctgaccatcagcagactggaacctgaggactttgctgtgtactattgccagcagtatggcagcagcccctggacatttggacagggcaccaaggtggaaatcaaaggtggtggtggctctgcccatcctggcagacctagagctgtgcccacacagtgtgatgtgcctccaaacagcagatttgactgtgcccctgacaaggccatcacacaagagcagtgtgaagccagaggctgctgttacatccctgccaagcaaggactgcaaggggctcagatgggacagccctggtgcttcttcccaccatcttaccccagctacaagctggaaaacctgagcagctctgagatgggctacactgctacactgaccagaaccacacctacattcttcccaaaggacatcctgacactgaggctggatgtgatgatggaaacagagaacaggctgcacttcaccatcaaggaccctgccaatagaagatatgaggtgcccctggaaacccctcatgtgcactctagagccccatctccactgtactctgtggaattttctgaggaaccctttggggtcatagtcagaaggcagctggatggcagagtgctgctgaacacaactgtggcccctctgttctttgctgatcagttcctgcagctgagcaccagcctgcctagccagtatatcacaggcctggcagagcacctgtctccactgatgctgagcacatcctggaccagaatcaccctgtggaacagagacctggctcccacacctggggccaacctgtatggctctcaccccttctatctggccctggaagatggtggttcagcccatggtgtctttctgctgaactccaatgccatggatgtggtgctgcagccctctcctgctctgtcttggagaagcactggtggcatcctggatgtgtacatctttctgggccctgagcctaagtctgtggtgcagcagtacctggatgttgtgggctaccccttcatgcctccttattggggcctgggcttccacctgtgcagatggggatacagcagcacagccatcaccagacaggttgtggaaaacatgaccagagcacacttcccactggatgtgcagtggaatgacctggactacatggacagcagaagggacttcaccttcaacaaggatggcttcagagacttccctgccatggtgcaagagctgcaccaaggtggtagaagatatatgatgattgtggacccagccatcagctcctctggaccagctggcagctacagaccctatgatgagggactgagaagaggggtgttcatcaccaatgagacaggccagcctctgattggcaaagtgtggccaggctccacagcctttccagatttcacaaaccccacagctctggcttggtgggaagatatggtggcagagttccatgatcaggtgccctttgatggcatgtggattgacatgaatgagcccagcaacttcatcaggggctctgaggatggatgccccaacaatgaactggaaaatcctccttatgtgcctggtgttgttggagggacactgcaggcagccacaatttgtgccagctctcaccagtttctgagcacccactacaacctgcacaatctgtatggcctgactgaggccattgccagccacagggctcttgtgaaggctagaggcaccagaccttttgtgatcagcaggtccacctttgctggccatggcagatatgctggccactggactggggatgtgtggtctagttgggagcagctggctagctctgtgcctgagatcctgcagttcaacctgctgggagtgccccttgttggagcagatgtgtgtggcttcctgggcaacacctcagaggaactgtgtgtcagatggactcagctgggagcattctaccctttcatgagaaaccacaacagcctgctgagcctgcctcaagagccttacagcttttctgagccagcacagcaggccatgagaaaggccctgactctgagatatgccctgctgcctcacctgtacaccctgttccatcaggctcatgtggctggggagactgtggctagacccctgttcctggaattccccaaggacagctccacctggacagtggatcatcagctgctgtggggagaagccctgctgattacacctgtgctgcaggctggcaaggctgaagtgacaggctacttccctcttggcacttggtatgacctgcagacagtgcctgtggaagctctgggatctctgcctccacctcctgctgctcctagagagcctgccattcactctgaaggccagtgggttaccctgcctgctccactggataccatcaatgtgcatctgagagcaggctacatcatccctctgcaaggccctggcctgaccaccacagaatctagacagcagccaatggcactggctgtggccctgaccaaaggtggagaagctagaggggagctgttctgggatgatggggagagcctggaagtgctggaaagaggggcctatacacaagtgatttttctggctaggaacaataccattgtgaatgagcttgtcagagtcacctctgaaggtgctggcctgcagctccagaaagtgacagtgcttggagtggccacagcaccccagcaagtgctgtctaatggggtgccagtgtccaacttcacatacagccctgataccaaggtcctggacatctgtgtgtccctgcttatgggagagcagttcctggtgtcttggtgctaataacctctactgtgccttctagttgccagccatctgttgtttgcccctcccccttgccttccttgaccctggaaggtgccactcccactgtcctttcctaataaaatgaggaaattgcatcacattgtctgagtaggtgtcattctattctggggggtggggtggggcaggacagcaagggggaggattgggaagacaatagcaggcatgctggggatgcagtgggctctatggcttctgaggtggaaagaaccagctggggctctagggggtatccccaataaaagatctttattttcattagatctgtgtgttggttttttgtgtgggatctaggaacccctagtgatggagttggccactccctctctgcgcgctcgctcgctcactgaggccgggcgaccaaaggtcgcccgacgcccgggctttgcccgggcggcctcagtgagcgagcgagcgcgcag

SEQ ID NO: 774 - DNA, 4691 bp, synthetic construct
  source 1..4691: mol_type = other DNA
  misc_feature 1..130: note = 130_bp_AAV2_ITR_-_Left
  misc_feature 139..238: note = mAlb SA
  misc_feature 241..3624: note = 12450 anti-CD63 scFv:GAA
  misc_feature 3631..3906: note = bGH pA
  misc_feature 3907..4506: note = Stuffer
  misc_feature 4507..4555: note = sPA
  misc_feature 4562..4691: note = 130_bp_AAV2_ITR_-_R
ctgcgcgctcgctcgctcactgaggccgcccgggcaaagcccgggcgtcgggcgacctttggtcgcccggcctcagtgagcgagcgagcgcgcagagagggagtggccaactccatcactaggggttcctagatctcttaggtcagtgaagagaagaacaaaaagcagcatattacagttagttgtcttcatcaatctttaaatatgttgtgtggtttttctctccctgtttccacagttcaggtccagctgcaagagtctggccccaaggtggtcaagccctctgagacactgagcctgacctgcacagtgtctggtggcagcatcagcagctactactggaactggatcagacagagccctggcaaaggcctggaatggattggctacaccaagagaggctacacagactacaaccccagcctgagaagcagagtgaccatctctgaggacaccagcaagaaccagttcagcctgaggatcagctctgtgacagctgctgacacagcagtgtactactgtgcccagatgggctggggcagccatgcctttgatatgtggggccagggcacaatggtggctgtgtccagtgggggctcaggaggaggtggctcaggaggtggaggttcaggaggggagattgtgctgacccagtctcctggcacactgtctctgagccctggggaaagagccacactgagctgtagagccagccagtctgtgtcctctagctacctggcctggtatcagcagaagcctggacaggctcccagactgctgatctatggggcctcttctagagccacaggcatccctgacagattcagtggcagtggctctggcacagacttcaccctgaccatcagcagactggaacctgaggactttgctgtgtactattgccagcagtatggcagcagcccctggacatttggacagggcaccaaggtggaaatcaaaggtggtggtggctctgcccatcctggcagacctagagctgtgcccacacagtgtgatgtgcctccaaacagcagatttgactgtgcccctgacaaggccatcacacaagagcagtgtgaagccagaggctgctgttacatccctgccaagcaaggactgcaaggggctcagatgggacagccctggtgcttcttcccaccatcttaccccagctacaagctggaaaacctgagcagctctgagatgggctacactgctacactgaccagaaccacacctacattcttcccaaaggacatcctgacactgaggctggatgtgatgatggaaacagagaacaggctgcacttcaccatcaaggaccctgccaatagaagatatgaggtgcccctggaaacccctcatgtgcactctagagccccatctccactgtactctgtggaattttctgaggaaccctttggggtcatagtcagaaggcagctggatggcagagtgctgctgaacacaactgtggcccctctgttctttgctgatcagttcctgcagctgagcaccagcctgcctagccagtatatcacaggcctggcagagcacctgtctccactgatgctgagcacatcctggaccagaatcaccctgtggaacagagacctggctcccacacctggggccaacctgtatggctctcaccccttctatctggccctggaagatggtggttcagcccatggtgtctttctgctgaactccaatgccatggatgtggtgctgcagccctctcctgctctgtcttggagaagcactggtggcatcctggatgtgtacatctttctgggccctgagcctaagtctgtggtgcagcagtacctggatgttgtgggctaccccttcatgcctccttattggggcctgggcttccacctgtgcagatggggatacagcagcacagccatcaccagacaggttgtggaaaacatgaccagagcacacttcccactggatgtgcagtggaatgacctggactacatggacagcagaagggacttcaccttcaacaaggatggcttcagagacttccctgccatggtgcaagagctgcaccaaggtggtagaagatatatgatgattgtggacccagccatcagctcctctggaccagctggcagctacagaccctatgatgagggactgagaagaggggtgttcatcaccaatgagacaggccagcctctgattggcaaagtgtggccaggctccacagcctttccagatttcacaaaccccacagctctggcttggtgggaagatatggtggcagagttccatgatcaggtgccctttgatggcatgtggattgacatgaatgagcccagcaacttcatcaggggctctgaggatggatgccccaacaatgaactggaaaatcctccttatgtgcctggtgttgttggagggacactgcaggcagccacaatttgtgccagctctcaccagtttctgagcacccactacaacctgcacaatctgtatggcctgactgaggccattgccagccacagggctcttgtgaaggctagaggcaccagaccttttgtgatcagcaggtccacctttgctggccatggcagatatgctggccactggactggggatgtgtggtctagttgggagcagctggctagctctgtgcctgagatcctgcagttcaacctgctgggagtgccccttgttggagcagatgtgtgtggcttcctgggcaacacctcagaggaactgtgtgtcagatggactcagctgggagcattctaccctttcatgagaaaccacaacagcctgctgagcctgcctcaagagccttacagcttttctgagccagcacagcaggccatgagaaaggccctgactctgagatatgccctgctgcctcacctgtacaccctgttccatcaggctcatgtggctggggagactgtggctagacccctgttcctggaattccccaaggacagctccacctggacagtggatcatcagctgctgtggggagaagccctgctgattacacctgtgctgcaggctggcaaggctgaagtgacaggctacttccctcttggcacttggtatgacctgcagacagtgcctgtggaagctctgggatctctgcctccacctcctgctgctcctagagagcctgccattcactctgaaggccagtgggttaccctgcctgctccactggataccatcaatgtgcatctgagagcaggctacatcatccctctgcaaggccctggcctgaccaccacagaatctagacagcagccaatggcactggctgtggccctgaccaaaggtggagaagctagaggggagctgttctgggatgatggggagagcctggaagtgctggaaagaggggcctatacacaagtgatttttctggctaggaacaataccattgtgaatgagcttgtcagagtcacctctgaaggtgctggcctgcagctccagaaagtgacagtgcttggagtggccacagcaccccagcaagtgctgtctaatggggtgccagtgtccaacttcacatacagccctgataccaaggtcctggacatctgtgtgtccctgcttatgggagagcagttcctggtgtcttggtgctaataacctctactgtgccttctagttgccagccatctgttgtttgcccctcccccttgccttccttgaccctggaaggtgccactcccactgtcctttcctaataaaatgaggaaattgcatcacattgtctgagtaggtgtcattctattctggggggtggggtggggcaggacagcaagggggaggattgggaagacaatagcaggcatgctggggatgcagtgggctctatggcttctgaggtggaaagaaccagctggggctctagggggtatccccaatgtaatagtcacggacattattatcggtctgggatgtcatagtagcttaacggtagcgtgttggaacggtattcggtcacacaaccatgcgacacgtttaagttctgatacagtgcaaagggcttctcatccaattggtctacctgaagactatggtagacatctatgctgccaagttgattttggggtacagtaactgtctaaactagaagatcttttttctaaccagcggcaaaccggttcaggtaaatggtacccgatccgcttgctgctggcgtggccaccgtaaggtgttgtacttgaattggctgaatgacgaatgtgacacggcgagcatctccgattggaggggacacggtgcggcacctacggggtctgaaatttggaccacgatggactctctcgaatgcagacgctcttaatacccaaagatcacggcacgcgacgcttaacttaggttggccatgagtaacttcgcggtctggcggcgccggggttgtcatggttccgtcctgcgatactttcttcaaaagtgtcagccattcgttccacactagctcgatcccacaaccaaagatatagggagggtgattcggacaataaaagatctttattttcattagatctgtgtgttggttttttgtgtgggatctaggaacccctagtgatggagttggccactccctctctgcgcgctcgctcgctcactgaggccgggcgaccaaaggtcgcccgacgcccgggctttgcccgggcggcctcagtgagcgagcgagcgcgcag

SEQ ID NO: 775 - DNA, 4171 bp, synthetic construct
  source 1..4171: mol_type = other DNA
  misc_feature 1..130: note = 130_bp_AAV2_ITR_-_Left
  misc_feature 139..238: note = mAlb SA
  misc_feature 241..3624: note = 12450 anti-CD63 scFv:GAA
  misc_feature 3631..3906: note = bGH pA
  misc_feature 3907..3937: note = MAZ
  misc_feature 3938..3968: note = MAZ
  misc_feature 3974..4004: note = MAZ
  misc_feature 4005..4035: note = MAZ
  misc_feature 4042..4171: note = 130_bp_AAV2_ITR_-_R
ctgcgcgctcgctcgctcactgaggccgcccgggcaaagcccgggcgtcgggcgacctttggtcgcccggcctcagtgagcgagcgagcgcgcagagagggagtggccaactccatcactaggggttcctagatctcttaggtcagtgaagagaagaacaaaaagcagcatattacagttagttgtcttcatcaatctttaaatatgttgtgtggtttttctctccctgtttccacagttcaggtccagctgcaagagtctggccccaaggtggtcaagccctctgagacactgagcctgacctgcacagtgtctggtggcagcatcagcagctactactggaactggatcagacagagccctggcaaaggcctggaatggattggctacaccaagagaggctacacagactacaaccccagcctgagaagcagagtgaccatctctgaggacaccagcaagaaccagttcagcctgaggatcagctctgtgacagctgctgacacagcagtgtactactgtgcccagatgggctggggcagccatgcctttgatatgtggggccagggcacaatggtggctgtgtccagtgggggctcaggaggaggtggctcaggaggtggaggttcaggaggggagattgtgctgacccagtctcctggcacactgtctctgagccctggggaaagagccacactgagctgtagagccagccagtctgtgtcctctagctacctggcctggtatcagcagaagcctggacaggctcccagactgctgatctatggggcctcttctagagccacaggcatccctgacagattcagtggcagtggctctggcacagacttcaccctgaccatcagcagactggaacctgaggactttgctgtgtactattgccagcagtatggcagcagcccctggacatttggacagggcaccaaggtggaaatcaaaggtggtggtggctctgcccatcctggcagacctagagctgtgcccacacagtgtgatgtgcctccaaacagcagatttgactgtgcccctgacaaggccatcacacaagagcagtgtgaagccagaggctgctgttacatccctgccaagcaaggactgcaaggggctcagatgggacagccctggtgcttcttcccaccatcttaccccagctacaagctggaaaacctgagcagctctgagatgggctacactgctacactgaccagaaccacacctacattcttcccaaaggacatcctgacactgaggctggatgtgatgatggaaacagagaacaggctgcacttcaccatcaaggaccctgccaatagaagatatgaggtgcccctggaaacccctcatgtgcactctagagccccatctccactgtactctgtggaattttctgaggaaccctttggggtcatagtcagaaggcagctggatggcagagtgctgctgaacacaactgtggcccctctgttctttgctgatcagttcctgcagctgagcaccagcctgcctagccagtatatcacaggcctggcagagcacctgtctccactgatgctgagcacatcctggaccagaatcaccctgtggaacagagacctggctcccacacctggggccaacctgtatggctctcaccccttctatctggccctggaagatggtggttcagcccatggtgtctttctgctgaactccaatgccatggatgtggtgctgcagccctctcctgctctgtcttggagaagcactggtggcatcctggatgtgtacatctttctgggccctgagcctaagtctgtggtgcagcagtacctggatgttgtgggctaccccttcatgcctccttattggggcctgggcttccacctgtgcagatggggatacagcagcacagccatcaccagacaggttgtggaaaacatgaccagagcacacttcccactggatgtgcagtggaatgacctggactacatggacagcagaagggacttcaccttcaacaaggatggcttcagagacttccctgccatggtgcaagagctgcaccaaggtggtagaagatatatgatgattgtggacccagccatcagctcctctggaccagctggcagctacagaccctatgatgagggactgagaagaggggtgttcatcaccaatgagacaggccagcctctgattggcaaagtgtggccaggctccacagcctttccagatttcacaaaccccacagctctggcttggtgggaagatatggtggcagagttccatgatcaggtgccctttgatggcatgtggattgacatgaatgagcccagcaacttcatcaggggctctgaggatggatgccccaacaatgaactggaaaatcctccttatgtgcctggtgttgttggagggacactgcaggcagccacaatttgtgccagctctcaccagtttctgagcacccactacaacctgcacaatctgtatggcctgactgaggccattgccagccacagggctcttgtgaaggctagaggcaccagaccttttgtgatcagcaggtccacctttgctggccatggcagatatgctggccactggactggggatgtgtggtctagttgggagcagctggctagctctgtgcctgagatcctgcagttcaacctgctgggagtgccccttgttggagcagatgtgtgtggcttcctgggcaacacctcagaggaactgtgtgtcagatggactcagctgggagcattctaccctttcatgagaaaccacaacagcctgctgagcctgcctcaagagccttacagcttttctgagccagcacagcaggccatgagaaaggccctgactctgagatatgccctgctgcctcacctgtacaccctgttccatcaggctcatgtggctggggagactgtggctagacccctgttcctggaattccccaaggacagctccacctggacagtggatcatcagctgctgtggggagaagccctgctgattacacctgtgctgcaggctggcaaggctgaagtgacaggctacttccctcttggcacttggtatgacctgcagacagtgcctgtggaagctctgggatctctgcctccacctcctgctgctcctagagagcctgccattcactctgaaggccagtgggttaccctgcctgctccactggataccatcaatgtgcatctgagagcaggctacatcatccctctgcaaggccctggcctgaccaccacagaatctagacagcagccaatggcactggctgtggccctgaccaaaggtggagaagctagaggggagctgttctgggatgatggggagagcctggaagtgctggaaagaggggcctatacacaagtgatttttctggctaggaacaataccattgtgaatgagcttgtcagagtcacctctgaaggtgctggcctgcagctccagaaagtgacagtgcttggagtggccacagcaccccagcaagtgctgtctaatggggtgccagtgtccaacttcacatacagccctgataccaaggtcctggacatctgtgtgtccctgcttatgggagagcagttcctggtgtcttggtgctaataacctctactgtgccttctagttgccagccatctgttgtttgcccctcccccttgccttccttgaccctggaaggtgccactcccactgtcctttcctaataaaatgaggaaattgcatcacattgtctgagtaggtgtcattctattctggggggtggggtggggcaggacagcaagggggaggattgggaagacaatagcaggcatgctggggatgcagtgggctctatggcttctgaggtggaaagaaccagctggggctctagggggtatccccctggccttgggggagggggaggccagaatgactggccttgggggagggggaggccagaatgagttgactggccttgggggagggggaggccagaatgactggccttgggggagggggaggccagaatgaagatctaggaacccctagtgatggagttggccactccctctctgcgcgctcgctcgctcactgaggccgggcgaccaaaggtcgcccgacgcccgggctttgcccgggcggcctcagtgagcgagcgagcgcgcag

SEQ ID NO: 776 - DNA, 4122 bp, synthetic construct
  source 1..4122: mol_type = other DNA
  misc_feature 1..130: note = 130_bp_AAV2_ITR_-_Left
  misc_feature 139..238: note = mAlb SA
  misc_feature 241..3624: note = 12450 anti-CD63 scFv:GAA
  misc_feature 3631..3857: note = SV40 polyA
  misc_feature 3858..3888: note = MAZ
  misc_feature 3889..3919: note = MAZ
  misc_feature 3925..3955: note = MAZ
  misc_feature 3956..3986: note = MAZ
  misc_feature 3993..4122: note = 130_bp_AAV2_ITR_-_R
ctgcgcgctcgctcgctcactgaggccgcccgggcaaagcccgggcgtcgggcgacctttggtcgcccggcctcagtgagcgagcgagcgcgcagagagggagtggccaactccatcactaggggttcctagatctcttaggtcagtgaagagaagaacaaaaagcagcatattacagttagttgtcttcatcaatctttaaatatgttgtgtggtttttctctccctgtttccacagttcaggtccagctgcaagagtctggccccaaggtggtcaagccctctgagacactgagcctgacctgcacagtgtctggtggcagcatcagcagctactactggaactggatcagacagagccctggcaaaggcctggaatggattggctacaccaagagaggctacacagactacaaccccagcctgagaagcagagtgaccatctctgaggacaccagcaagaaccagttcagcctgaggatcagctctgtgacagctgctgacacagcagtgtactactgtgcccagatgggctggggcagccatgcctttgatatgtggggccagggcacaatggtggctgtgtccagtgggggctcaggaggaggtggctcaggaggtggaggttcaggaggggagattgtgctgacccagtctcctggcacactgtctctgagccctggggaaagagccacactgagctgtagagccagccagtctgtgtcctctagctacctggcctggtatcagcagaagcctggacaggctcccagactgctgatctatggggcctcttctagagccacaggcatccctgacagattcagtggcagtggctctggcacagacttcaccctgaccatcagcagactggaacctgaggactttgctgtgtactattgccagcagtatggcagcagcccctggacatttggacagggcaccaaggtggaaatcaaaggtggtggtggctctgcccatcctggcagacctagagctgtgcccacacagtgtgatgtgcctccaaacagcagatttgactgtgcccctgacaaggccatcacacaagagcagtgtgaagccagaggctgctgttacatccctgccaagcaaggactgcaaggggctcagatgggacagccctggtgcttcttcccaccatcttaccccagctacaagctggaaaacctgagcagctctgagatgggctacactgctacactgaccagaaccacacctacattcttcccaaaggacatcctgacactgaggctggatgtgatgatggaaacagagaacaggctgcacttcaccatcaaggaccctgccaatagaagatatgaggtgcccctggaaacccctcatgtgcactctagagccccatctccactgtactctgtggaattttctgaggaaccctttggggtcatagtcagaaggcagctggatggcagagtgctgctgaacacaactgtggcccctctgttctttgctgatcagttcctgcagctgagcaccagcctgcctagccagtatatcacaggcctggcagagcacctgtctccactgatgctgagcacatcctggaccagaatcaccctgtggaacagagacctggctcccacacctggggccaacctgtatggctctcaccccttctatctggccctggaagatggtggttcagcccatggtgtctttctgctgaactccaatgccatggatgtggtgctgcagccctctcctgctctgtcttggagaagcactggtggcatcctggatgtgtacatctttctgggccctgagcctaagtctgtggtgcagcagtacctggatgttgtgggctaccccttcatgcctccttattggggcctgggcttccacctgtgcagatggggatacagcagcacagccatcaccagacaggttgtggaaaacatgaccagagcacacttcccactggatgtgcagtggaatgacctggactacatggacagcagaagggacttcaccttcaacaaggatggcttcagagacttccctgccatggtgcaagagctgcaccaaggtggtagaagatatatgatgattgtggacccagccatcagctcctctggaccagctggcagctacagaccctatgatgagggactgagaagaggggtgttcatcaccaatgagacaggccagcctctgattggcaaagtgtggccaggctccacagcctttccagatttcacaaaccccacagctctggcttggtgggaagatatggtggcagagttccatgatcaggtgccctttgatggcatgtggattgacatgaatgagcccagcaacttcatcaggggctctgaggatggatgccccaacaatgaactggaaaatcctccttatgtgcctggtgttgttggagggacactgcaggcagccacaatttgtgccagctctcaccagtttctgagcacccactacaacctgcacaatctgtatggcctgactgaggccattgccagccacagggctcttgtgaaggctagaggcaccagaccttttgtgatcagcaggtccacctttgctggccatggcagatatgctggccactggactggggatgtgtggtctagttgggagcagctggctagctctgtgcctgagatcctgcagttcaacctgctgggagtgccccttgttggagcagatgtgtgtggcttcctgggcaacacctcagaggaactgtgtgtcagatggactcagctgggagcattctaccctttcatgagaaaccacaacagcctgctgagcctgcctcaagagccttacagcttttctgagccagcacagcaggccatgagaaaggccctgactctgagatatgccctgctgcctcacctgtacaccctgttccatcaggctcatgtggctggggagactgtggctagacccctgttcctggaattccccaaggacagctccacctggacagtggatcatcagctgctgtggggagaagccctgctgattacacctgtgctgcaggctggcaaggctgaagtgacaggctacttccctcttggcacttggtatgacctgcagacagtgcctgtggaagctctgggatctctgcctccacctcctgctgctcctagagagcctgccattcactctgaaggccagtgggttaccctgcctgctccactggataccatcaatgtgcatctgagagcaggctacatcatccctctgcaaggccctggcctgaccaccacagaatctagacagcagccaatggcactggctgtggccctgaccaaaggtggagaagctagaggggagctgttctgggatgatggggagagcctggaagtgctggaaagaggggcctatacacaagtgatttttctggctaggaacaataccattgtgaatgagcttgtcagagtcacctctgaaggtgctggcctgcagctccagaaagtgacagtgcttggagtggccacagcaccccagcaagtgctgtctaatggggtgccagtgtccaacttcacatacagccctgataccaaggtcctggacatctgtgtgtccctgcttatgggagagcagttcctggtgtcttggtgctaataatcagccataccacatttgtagaggttttacttgctttaaaaaacctcccacacctccccctgaacctgaaacataaaatgaatgcaattgttgttgttaacttgtttattgcagcttataatggttacaaataaagcaatagcatcacaaatttcacaaataaagcatttttttcactgcattctagttgtggtttgtccaaactcatcaatgtatcttatcatgtcctggccttgggggagggggaggccagaatgactggccttgggggagggggaggccagaatgagttgactggccttgggggagggggaggccagaatgactggccttgggggagggggaggccagaatgaagatctaggaacccctagtgatggagttggccactccctctctgcgcgctcgctcgctcactgaggccgggcgaccaaaggtcgcccgacgcccgggctttgcccgggcggcctcagtgagcgagcgagcgcgcag

SEQ ID NO: 777 - DNA, 4270 bp, synthetic construct
  source 1..4270: mol_type = other DNA
  misc_feature 1..130: note = 130bp AAV2 ITR L
  misc_feature 139..238: note = mAlb SA
  misc_feature 241..3624: note = 12450 anti-CD63 scFv:GAA
  misc_feature 3631..3906: note = bGH pA
  misc_feature 3908..4134: note = SV40 late polyA
  misc_feature 4141..4270: note = 130bp AAV2 ITR R
ctgcgcgctcgctcgctcactgaggccgcccgggcaaagcccgggcgtcgggcgacctttggtcgcccggcctcagtgagcgagcgagcgcgcagagagggagtggccaactccatcactaggggttcctagatctcttaggtcagtgaagagaagaacaaaaagcagcatattacagttagttgtcttcatcaatctttaaatatgttgtgtggtttttctctccctgtttccacagttcaagtccagctgcaagagtctggccccaaggtggtcaagccctctgagacactgagcctgacctgcacagtgtctggtggcagcatcagcagctactactggaactggatcagacagagccctggcaaaggactggaatggattggctacaccaagagaggctacacagactacaaccccagcctgagaagcagagtgaccatctctgaggacaccagcaagaaccagttcagcctgaggatcagctctgtgacagctgctgacacagcagtttactactgtgcccagatgggctggggcagccatgcctttgatatgtggggccagggcacaatggtggctgtgtccagtgggggctcaggaggaggtggctcaggaggtggaggttcaggaggggagattgtgctgacccagtctcctggcacactgtctctgagccctggggaaagagccacactgagctgtagagccagccagtctgtgtcctctagctacctggcctggtatcagcagaagcctggacaggctcccagactgctgatctatggggcctcttctagagccacaggcatccctgacagattcagtggcagtggctctggcacagacttcaccctgaccatcagcagactggaacctgaggactttgctgtgtactattgccagcagtatggcagcagcccctggacatttggacagggcaccaaggtggaaatcaaagggggtggtggctctgcccatcctggcagacctagagctgtgcccacacagtgtgatgtgcctccaaacagcagatttgactgtgcccctgacaaggccatcacacaagagcagtgtgaagccagaggctgctgttacatccctgccaagcaaggactgcaaggggctcagatgggacagccctggtgcttcttcccaccatcttaccccagctacaagctggaaaacctgagcagctctgagatgggctacactgctacactgaccagaaccacacctacattcttcccaaaggacatcctgacactgaggctggatgtgatgatggaaacagagaacaggctgcacttcaccatcaaggaccctgccaatagaagatatgaggtgcccctggaaacccctcatgtgcactctagagccccatctccactgtactctgtggaattttctgaggaaccctttggggtcatagtcagaaggcagctggatggcagagtgctgctgaacacaactgtggcccctctgttctttgctgatcagttcctgcagctgagcaccagcctgcctagccagtatatcacaggcctggcagagcacctgtctccactgatgctgagcacatcctggaccagaatcaccctgtggaacagagacctggctcccacacctggggccaacctgtatggctctcaccccttctatctggccctggaagatggtggttcagcccatggtgtctttctgctgaactccaatgccatggatgtggtgctgcagccctctcctgctctgtcttggagaagcactggtggcatcctggatgtgtacatctttctgggccctgagcctaagtctgtggtgcagcagtacctggatgttgtgggctaccccttcatgcctccttattggggcctgggcttccacctgtgcagatggggatacagcagcacagccatcaccagacaggttgtggaaaacatgaccagagcacacttcccactggatgtgcagtggaatgacctggactacatggacagcagaagggacttcaccttcaacaaggatggcttcagagacttccctgccatggtgcaagagctgcaccaagggggcagaagatatatgatgattgtggacccagccatcagctcctctggaccagctggcagctacagaccctatgatgagggactgagaagaggggtgttcatcaccaatgagacaggccagcctctgattggcaaagtgtggccaggctccacagcctttccagatttcacaaaccccacagctctggcttggtgggaagatatggtggcagagttccatgatcaggtgccctttgatggcatgtggattgacatgaatgagcccagcaacttcatcaggggctctgaggatggatgccccaacaatgaactggaaaatcctccttatgtgcctggtgttgttggagggacactgcaggcagccacaatttgtgccagctctcaccagtttctgagcacccactacaacctgcacaatctgtatggcctgactgaggccattgccagccacagggctcttgtgaaggctagaggcaccagaccttttgtgatcagcaggtccacctttgctggccatggcagatatgctggccactggactggggatgtgtggtctagttgggagcagctggctagctctgtgcctgagatcctgcagttcaacctgctgggagtgccccttgttggagcagatgtgtgtggcttcctgggcaacacctcagaggaactgtgtgtcagatggactcagctgggagcattctaccctttcatgagaaaccacaacagcctgctgagcctgcctcaagagccttacagcttttctgagccagcacagcaggccatgagaaaggccctgactctgagatatgccctgctgcctcacctgtacaccctgttccatcaggctcatgtggctggggagactgtggctagacccctgttcctggaattccccaaggacagctccacctggacagtggatcatcagctgctgtggggagaagccctgctgattacacctgtgctgcaggctggcaaggctgaagtgacaggctacttccctcttggcacttggtatgacctgcagacagtgcctgtggaagctctgggatctctgcctccacctcctgctgctcctagagagcctgccattcactctgaaggccagtgggttaccctgcctgctccactggataccatcaatgtgcatctgagagcaggctacatcatccctctgcaaggccctggcctgaccaccacagaatctagacagcagccaatggcactggctgtggccctgaccaaagggggagaagctagaggggagctgttctgggatgatggggagagcctggaagtgctggaaagaggggcctatacacaagtgatttttctggctaggaacaataccattgtgaatgagcttgtcagagtcacctctgaaggtgctggcctgcagctccagaaagtgacagtgcttggagtggccacagcaccccagcaagtgctgtctaatggggtgccagtgtccaacttcacatacagccctgataccaaggtcctggacatctgtgtgtccctgcttatgggagagcagttcctggtgtcttggtgctaataacctctactgtgccttctagttgccagccatctgttgtttgcccctcccccttgccttccttgaccctggaaggtgccactcccactgtcctttcctaataaaatgaggaaattgcatcacattgtctgagtaggtgtcattctattctggggggtggggtggggcaggacagcaagggggaggattgggaagacaatagcaggcatgctggggatgcagtgggctctatggcttctgaggtggaaagaaccagctggggctctagggggtatccccagacatgataagatacattgatgagtttggacaaaccacaactagaatgcagtgaaaaaaatgcttgatttgtgaaatttgtgatgctattgcttgatttgtaaccattataagctgcaataaacaagttaacaacaacaattgcattcattttatgtttcaggttcagggggaggtgtgggaggttttttaaagcaagtaaaacctctacaaatgtggtatggctgaagatctaggaacccctagtgatggagttggccactccctctctgcgcgctcgctcgctcactgaggccgggcgaccaaaggtcgcccgacgcccgggctttgcccgggcggcctcagtgagcgagcgagcgcgcag

SEQ ID NO: 778 - DNA, 4042 bp, synthetic construct
  source 1..4042: mol_type = other DNA
  misc_feature 1..130: note = 130bp AAV2 ITR L
  misc_feature 139..238: note = mAlb SA
  misc_feature 241..3624: note = 12450 anti-CD63 scFv:GAA
  misc_feature 3631..3906: note = bGH pA
  misc_feature 3913..4042: note = 130bp AAV2 ITR R
ctgcgcgctcgctcgctcactgaggccgcccgggcaaagcccgggcgtcgggcgacctttggtcgcccggcctcagtgagcgagcgagcgcgcagagagggagtggccaactccatcactaggggttcctagatctcttaggtcagtgaagagaagaacaaaaagcagcatattacagttagttgtcttcatcaatctttaaatatgttgtgtggtttttctctccctgtttccacagttcaagtccagctgcaagagtctggccccaaggtggtcaagccctctgagacactgagcctgacctgcacagtgtctggtggcagcatcagcagctactactggaactggatcagacagagccctggcaaaggactggaatggattggctacaccaagagaggctacacagactacaaccccagcctgagaagcagagtgaccatctctgaggacaccagcaagaaccagttcagcctgaggatcagctctgtgacagctgctgacacagcagtttactactgtgcccagatgggctggggcagccatgcctttgatatgtggggccagggcacaatggtggctgtgtccagtgggggctcaggaggaggtggctcaggaggtggaggttcaggaggggagattgtgctgacccagtctcctggcacactgtctctgagccctggggaaagagccacactgagctgtagagccagccagtctgtgtcctctagctacctggcctggtatcagcagaagcctggacaggctcccagactgctgatctatggggcctcttctagagccacaggcatccctgacagattcagtggcagtggctctggcacagacttcaccctgaccatcagcagactggaacctgaggactttgctgtgtactattgccagcagtatggcagcagcccctggacatttggacagggcaccaaggtggaaatcaaagggggtggtggctctgcccatcctggcagacctagagctgtgcccacacagtgtgatgtgcctccaaacagcagatttgactgtgcccctgacaaggccatcacacaagagcagtgtgaagccagaggctgctgttacatccctgccaagcaaggactgcaaggggctcagatgggacagccctggtgcttcttcccaccatcttaccccagctacaagctggaaaacctgagcagctctgagatgggctacactgctacactgaccagaaccacacctacattcttcccaaaggacatcctgacactgaggctggatgtgatgatggaaacagagaacaggctgcacttcaccatcaaggaccctgccaatagaagatatgaggtgcccctggaaacccctcatgtgcactctagagccccatctccactgtactctgtggaattttctgaggaaccctttggggtcatagtcagaaggcagctggatggcagagtgctgctgaacacaactgtggcccctctgttctttgctgatcagttcctgcagctgagcaccagcctgcctagccagtatatcacaggcctggcagagcacctgtctccactgatgctgagcacatcctggaccagaatcaccctgtggaacagagacctggctcccacacctggggccaacctgtatggctctcaccccttctatctggccctggaagatggtggttcagcccatggtgtctttctgctgaactccaatgccatggatgtggtgctgcagccctctcctgctctgtcttggagaagcactggtggcatcctggatgtgtacatctttctgggccctgagcctaagtctgtggtgcagcagtacctggatgttgtgggctaccccttcatgcctccttattggggcctgggcttccacctgtgcagatggggatacagcagcacagccatcaccagacaggttgtggaaaacatgaccagagcacacttcccactggatgtgcagtggaatgacctggactacatggacagcagaagggacttcaccttcaacaaggatggcttcagagacttccctgccatggtgcaagagctgcaccaagggggcagaagatatatgatgattgtggacccagccatcagctcctctggaccagctggcagctacagaccctatgatgagggactgagaagaggggtgttcatcaccaatgagacaggccagcctctgattggcaaagtgtggccaggctccacagcctttccagatttcacaaaccccacagctctggcttggtgggaagatatggtggcagagttccatgatcaggtgccctttgatggcatgtggattgacatgaatgagcccagcaacttcatcaggggctctgaggatggatgccccaacaatgaactggaaaatcctccttatgtgcctggtgttgttggagggacactgcaggcagccacaatttgtgccagctctcaccagtttctgagcacccactacaacctgcacaatctgtatggcctgactgaggccattgccagccacagggctcttgtgaaggctagaggcaccagaccttttgtgatcagcaggtccacctttgctggccatggcagatatgctggccactggactggggatgtgtggtctagttgggagcagctggctagctctgtgcctgagatcctgcagttcaacctgctgggagtgccccttgttggagcagatgtgtgtggcttcctgggcaacacctcagaggaactgtgtgtcagatggactcagctgggagcattctaccctttcatgagaaaccacaacagcctgctgagcctgcctcaagagccttacagcttttctgagccagcacagcaggccatgagaaaggccctgactctgagatatgccctgctgcctcacctgtacaccctgttccatcaggctcatgtggctggggagactgtggctagacccctgttcctggaattccccaaggacagctccacctggacagtggatcatcagctgctgtggggagaagccctgctgattacacctgtgctgcaggctggcaaggctgaagtgacaggctacttccctcttggcacttggtatgacctgcagacagtgcctgtggaagctctgggatctctgcctccacctcctgctgctcctagagagcctgccattcactctgaaggccagtgggttaccctgcctgctccactggataccatcaatgtgcatctgagagcaggctacatcatccctctgcaaggccctggcctgaccaccacagaatctagacagcagccaatggcactggctgtggccctgaccaaagggggagaagctagaggggagctgttctgggatgatggggagagcctggaagtgctggaaagaggggcctatacacaagtgatttttctggctaggaacaataccattgtgaatgagcttgtcagagtcacctctgaaggtgctggcctgcagctccagaaagtgacagtgcttggagtggccacagcaccccagcaagtgctgtctaatggggtgccagtgtccaacttcacatacagccctgataccaaggtcctggacatctgtgtgtccctgcttatgggagagcagttcctggtgtcttggtgctaataacctctactgtgccttctagttgccagccatctgttgtttgcccctcccccttgccttccttgaccctggaaggtgccactcccactgtcctttcctaataaaatgaggaaattgcatcacattgtctgagtaggtgtcattctattctggggggtggggtggggcaggacagcaagggggaggattgggaagacaatagcaggcatgctggggatgcagtgggctctatggcttctgaggtggaaagaaccagctggggctctagggggtatccccagatctaggaacccctagtgatggagttggccactccctctctgcgcgctcgctcgctcactgaggccgggcgaccaaaggtcgcccgacgcccgggctttgcccgggcggcctcagtgagcgagcgagcgcgcag

SEQ ID NO: 779 - DNA, 3746 bp, synthetic construct
  source 1..3746: mol_type = other DNA
  misc_feature 1..100: note = mAlb SA
  misc_feature 103..426: note = H1H12847VK
  misc_feature 427..471: note = 3X G4S
  misc_feature 472..834: note = H1H112847VH
  misc_feature 835..864: note = 2X G4S
  misc_feature 865..3513: note = GAA
  misc_feature 3520..3746: note = SV40 polyA
taggtcagtgaagagaagaacaaaaagcagcatattacagttagttgtcttcatcaatctttaaatatgttgtgtggtttttctctccctgtttccacagttgacatccagatgacacagagcccctctagcctgtctgcctctgtgggagacagagtgaccatcacctgtagagccagccagagcatcagcagctacctgaactggtatcagcagaagcctggcaaggcccctaaactgctgatctatgctgccagcagcctgcagtctggggtgccctctagattttctggcagtggctctggcacagacttcaccctgaccataagctccctgcagcctgaggactttgccacctactactgtcagcagagctacagcacccctcctatcacctttggccagggcaccagactggaaatcaaaggtggtggtggaagtggtggtggtggcagtggtggtggtggatctgaagtgcagctggtggaaagtggtggtggcctggttcagcctggcagatccctgagactgagctgtgcagcctctggctttacctttgatgactatgccatgaactgggtcagacaggccccaggcaaaggcctggaatgggtgtcaggcatctcttggtcctctggctccatggactatgctgactctgtgaagggcagattcaccatcagcagagacaatgccaagaacagcctgtacctgcagatgaactccctgagaacagaggacacagccctgtactactgtgccaaggccagagaagtgggagactactatggcatggatgtgtggggccagggaaccacagtgacagtcagtagtggtggtggtggcagtggtggtggtggttctgcccatcctggcagacctagagctgtgcccacacagtgtgatgtgcctccaaacagcagatttgactgtgcccctgacaaggccatcacacaagagcagtgtgaagccagaggctgctgttacatccctgccaagcaaggactgcaaggggctcagatgggacagccctggtgcttcttcccaccatcttaccccagctacaagctggaaaacctgagcagctctgagatgggctacactgctacactgaccagaaccacacctacattcttcccaaaggacatcctgacactgaggctggatgtgatgatggaaacagagaacaggctgcacttcaccatcaaggaccctgccaatagaagatatgaggtgcccctggaaacccctcatgtgcactctagagccccatctccactgtactctgtggaattttctgaggaaccctttggggtcatagtcagaaggcagctggatggcagagtgctgctgaacacaactgtggcccctctgttctttgctgatcagttcctgcagctgagcaccagcctgcctagccagtatatcacaggcctggcagagcacctgtctccactgatgctgagcacatcctggaccagaatcaccctgtggaacagagacctggctcccacacctggggccaacctgtatggctctcaccccttctatctggccctggaagatggtggttcagcccatggtgtctttctgctgaactccaatgccatggatgtggtgctgcagccctctcctgctctgtcttggagaagcactggtggcatcctggatgtgtacatctttctgggccctgagcctaagtctgtggtgcagcagtacctggatgttgtgggctaccccttcatgcctccttattggggcctgggcttccacctgtgcagatggggatacagcagcacagccatcaccagacaggttgtggaaaacatgaccagagcacacttcccactggatgtgcagtggaatgacctggactacatggacagcagaagggacttcaccttcaacaaggatggcttcagagacttccctgccatggtgcaagagctgcaccaaggtggtagaagatatatgatgattgtggacccagccatcagctcctctggaccagctggcagctacagaccctatgatgagggactgagaagaggggtgttcatcaccaatgagacaggccagcctctgattggcaaagtgtggccaggctccacagcctttccagatttcacaaaccccacagctctggcttggtgggaagatatggtggcagagttccatgatcaggtgccctttgatggcatgtggattgacatgaatgagcccagcaacttcatcaggggctctgaggatggatgccccaacaatgaactggaaaatcctccttatgtgcctggtgttgttggagggacactgcaggcagccacaatttgtgccagctctcaccagtttctgagcacccactacaacctgcacaatctgtatggcctgactgaggccattgccagccacagggctcttgtgaaggctagaggcaccagaccttttgtgatcagcaggtccacctttgctggccatggcagatatgctggccactggactggggatgtgtggtctagttgggagcagctggctagctctgtgcctgagatcctgcagttcaacctgctgggagtgccccttgttggagcagatgtgtgtggcttcctgggcaacacctcagaggaactgtgtgtcagatggactcagctgggagcattctaccctttcatgagaaaccacaacagcctgctgagcctgcctcaagagccttacagcttttctgagccagcacagcaggccatgagaaaggccctgactctgagatatgccctgctgcctcacctgtacaccctgttccatcaggctcatgtggctggggagactgtggctagacccctgttcctggaattccccaaggacagctccacctggacagtggatcatcagctgctgtggggagaagccctgctgattacacctgtgctgcaggctggcaaggctgaagtgacaggctacttccctcttggcacttggtatgacctgcagacagtgcctgtggaagctctgggatctctgcctccacctcctgctgctcctagagagcctgccattcactctgaaggccagtgggttaccctgcctgctccactggataccatcaatgtgcatctgagagcaggctacatcatccctctgcaaggccctggcctgaccaccacagaatctagacagcagccaatggcactggctgtggccctgaccaaaggtggagaagctagaggggagctgttctgggatgatggggagagcctggaagtgctggaaagaggggcctatacacaagtgatttttctggctaggaacaataccattgtgaatgagcttgtcagagtcacctctgaaggtgctggcctgcagctccagaaagtgacagtgcttggagtggccacagcaccccagcaagtgctgtctaatggggtgccagtgtccaacttcacatacagccctgataccaaggtcctggacatctgtgtgtccctgcttatgggagagcagttcctggtgtcttggtgctaataatcagccataccacatttgtagaggttttacttgctttaaaaaacctcccacacctccccctgaacctgaaacataaaatgaatgcaattgttgttgttaacttgtttattgcagcttataatggttacaaataaagcaatagcatcacaaatttcacaaataaagcatttttttcactgcattctagttgtggtttgtccaaactcatcaatgtatcttatcatgtc

SEQ ID NO: 780 - DNA, 4023 bp, synthetic construct
  source 1..4023: mol_type = other DNA
  misc_feature 1..100: note = mAlb_SA
  misc_feature 103..426: note = H1H12847 VK
  misc_feature 427..471: note = 3xG4S
  misc_feature 472..834: note = H1H12847 VH
  misc_feature 835..864: note = 2xG4S
  misc_feature 865..3513: note = GAA (70-952)
  misc_feature 3520..3795: note = bGH pA
  misc_feature 3797..4023: note = SV40_late_polyA
taggtcagtgaagagaagaacaaaaagcagcatattacagttagttgtcttcatcaatctttaaatatgttgtgtggtttttctctccctgtttccacagttgacatccagatgacccagagccccagctccctgtcagccagtgtgggtgacagagtgaccatcacctgcagagccagccagagcatcagcagctacctgaactggtaccagcagaaacctggcaaagcccccaagctgctgatttatgctgctagcagcctgcagagtggagtgcccagcagattctcaggcagtggctctggcacagacttcaccctgaccatctccagcctgcagccagaagactttgccacctactactgccagcagagctacagcacccctcctatcacctttggccagggcacaagactggagatcaagggaggaggaggctctggaggaggaggctctggagggggaggctctgaggtccaactggttgaatctggagggggcctggtgcaacctggcaggagcctgagactgagctgtgctgcctctggcttcacctttgatgactatgccatgaactgggtgagacaggcccctggcaagggcctggagtgggtgtctggcatcagctggagctctggcagcatggactatgcagattctgtgaagggcaggttcaccatcagcagagataatgccaagaacagcctgtacctgcagatgaacagcctcaggacagaggacacagccctgtactactgtgccaaggccagagaagtgggtgactactatggcatggatgtgtggggccagggcaccacagtgacagtgagctctgggggaggaggctcaggtgggggtggcagtgcccatcctggcagacctagagctgtgcccacacagtgtgatgtgcctccaaacagcagatttgactgtgcccctgacaaggccatcacacaagagcagtgtgaagccagaggctgctgttacatccctgccaagcaaggactgcaaggggctcagatgggacagccctggtgcttcttcccaccatcttaccccagctacaagctggaaaacctgagcagctctgagatgggctacactgctacactgaccagaaccacacctacattcttcccaaaggacatcctgacactgaggctggatgtgatgatggaaacagagaacaggctgcacttcaccatcaaggaccctgccaatagaagatatgaggtgcccctggaaacccctcatgtgcactctagagccccatctccactgtactctgtggaattttctgaggaaccctttggggtcatagtcagaaggcagctggatggcagagtgctgctgaacacaactgtggcccctctgttctttgctgatcagttcctgcagctgagcaccagcctgcctagccagtatatcacaggcctggcagagcacctgtctccactgatgctgagcacatcctggaccagaatcaccctgtggaacagagacctggctcccacacctggggccaacctgtatggctctcaccccttctatctggccctggaagatggtggttcagcccatggtgtctttctgctgaactccaatgccatggatgtggtgctgcagccctctcctgctctgtcttggagaagcactggtggcatcctggatgtgtacatctttctgggccctgagcctaagtctgtggtgcagcagtacctggatgttgtgggctaccccttcatgcctccttattggggcctgggcttccacctgtgcagatggggatacagcagcacagccatcaccagacaggttgtggaaaacatgaccagagcacacttcccactggatgtgcagtggaatgacctggactacatggacagcagaagggacttcaccttcaacaaggatggcttcagagacttccctgccatggtgcaagagctgcaccaagggggcagaagatatatgatgattgtggacccagccatcagctcctctggaccagctggcagctacagaccctatgatgagggactgagaagaggggtgttcatcaccaatgagacaggccagcctctgattggcaaagtgtggccaggctccacagcctttccagatttcacaaaccccacagctctggcttggtgggaagatatggtggcagagttccatgatcaggtgccctttgatggcatgtggattgacatgaatgagcccagcaacttcatcaggggctctgaggatggatgccccaacaatgaactggaaaatcctccttatgtgcctggtgttgttggagggacactgcaggcagccacaatttgtgccagctctcaccagtttctgagcacccactacaacctgcacaatctgtatggcctgactgaggccattgccagccacagggctcttgtgaaggctagaggcaccagaccttttgtgatcagcaggtccacctttgctggccatggcagatatgctggccactggactggggatgtgtggtctagttgggagcagctggctagctctgtgcctgagatcctgcagttcaacctgctgggagtgccccttgttggagcagatgtgtgtggcttcctgggcaacacctcagaggaactgtgtgtcagatggactcagctgggagcattctaccctttcatgagaaaccacaacagcctgctgagcctgcctcaagagccttacagcttttctgagccagcacagcaggccatgagaaaggccctgactctgagatatgccctgctgcctcacctgtacaccctgttccatcaggctcatgtggctggggagactgtggctagacccctgttcctggaattccccaaggacagctccacctggacagtggatcatcagctgctgtggggagaagccctgctgattacacctgtgctgcaggctggcaaggctgaagtgacaggctacttccctcttggcacttggtatgacctgcagacagtgcctgtggaagctctgggatctctgcctccacctcctgctgctcctagagagcctgccattcactctgaaggccagtgggttaccctgcctgctccactggataccatcaatgtgcatctgagagcaggctacatcatccctctgcaaggccctggcctgaccaccacagaatctagacagcagccaatggcactggctgtggccctgaccaaagggggagaagctagaggggagctgttctgggatgatggggagagcctggaagtgctggaaagaggggcctatacacaagtgatttttctggctaggaacaataccattgtgaatgagcttgtcagagtcacctctgaaggtgctggcctgcagctccagaaagtgacagtgcttggagtggccacagcaccccagcaagtgctgtctaatggggtgccagtgtccaacttcacatacagccctgataccaaggtcctggacatctgtgtgtccctgcttatgggagagcagttcctggtgtcttggtgctaataacctctactgtgccttctagttgccagccatctgttgtttgcccctcccccttgccttccttgaccctggaaggtgccactcccactgtcctttcctaataaaatgaggaaattgcatcacattgtctgagtaggtgtcattctattctggggggtggggtggggcaggacagcaagggggaggattgggaagacaatagcaggcatgctggggatgcagtgggctctatggcttctgaggtggaaagaaccagctggggctctagggggtatccccagacatgataagatacattgatgagtttggacaaaccacaactagaatgcagtgaaaaaaatgcttgatttgtgaaatttgtgatgctattgcttgatttgtaaccattataagctgcaataaacaagttaacaacaacaattgcattcattttatgtttcaggttcagggggaggtgtgggaggttttttaaagcaagtaaaacctctacaaatgtggtatggctga

SEQ ID NO: 781 - DNA, 3795 bp, synthetic construct
  source 1..3795: mol_type = other DNA
  misc_feature 1..100: note = mAlb_SA
  misc_feature 103..426: note = H1H12847 VK
  misc_feature 427..471: note = 3xG4S
  misc_feature 472..834: note = H1H12847 VH
  misc_feature 835..864: note = 2xG4S
  misc_feature 865..3513: note = GAA (70-952)
  misc_feature 3520..3795: note = bGH pA
taggtcagtgaagagaagaacaaaaagcagcatattacagttagttgtcttcatcaatctttaaatatgttgtgtggtttttctctccctgtttccacagttgacatccagatgacccagagccccagctccctgtcagccagtgtgggtgacagagtgaccatcacctgcagagccagccagagcatcagcagctacctgaactggtaccagcagaaacctggcaaagcccccaagctgctgatttatgctgctagcagcctgcagagtggagtgcccagcagattctcaggcagtggctctggcacagacttcaccctgaccatctccagcctgcagccagaagactttgccacctactactgccagcagagctacagcacccctcctatcacctttggccagggcacaagactggagatcaagggaggaggaggctctggaggaggaggctctggagggggaggctctgaggtccaactggttgaatctggagggggcctggtgcaacctggcaggagcctgagactgagctgtgctgcctctggcttcacctttgatgactatgccatgaactgggtgagacaggcccctggcaagggcctggagtgggtgtctggcatcagctggagctctggcagcatggactatgcagattctgtgaagggcaggttcaccatcagcagagataatgccaagaacagcctgtacctgcagatgaacagcctcaggacagaggacacagccctgtactactgtgccaaggccagagaagtgggtgactactatggcatggatgtgtggggccagggcaccacagtgacagtgagctctgggggaggaggctcaggtgggggtggcagtgcccatcctggcagacctagagctgtgcccacacagtgtgatgtgcctccaaacagcagatttgactgtgcccctgacaaggccatcacacaagagcagtgtgaagccagaggctgctgttacatccctgccaagcaaggactgcaaggggctcagatgggacagccctggtgcttcttcccaccatcttaccccagctacaagctggaaaacctgagcagctctgagatgggctacactgctacactgaccagaaccacacctacattcttcccaaaggacatcctgacactgaggctggatgtgatgatggaaacagagaacaggctgcacttcaccatcaaggaccctgccaatagaagatatgaggtgcccctggaaacccctcatgtgcactctagagccccatctccactgtactctgtggaattttctgaggaaccctttggggtcatagtcagaaggcagctggatggcagagtgctgctgaacacaactgtggcccctctgttctttgctgatcagttcctgcagctgagcaccagcctgcctagccagtatatcacaggcctggcagagcacctgtctccactgatgctgagcacatcctggaccagaatcaccctgtggaacagagacctggctcccacacctggggccaacctgtatggctctcaccccttctatctggccctggaagatggtggttcagcccatggtgtctttctgctgaactccaatgccatggatgtggtgctgcagccctctcctgctctgtcttggagaagcactggtggcatcctggatgtgtacatctttctgggccctgagcctaagtctgtggtgcagcagtacctggatgttgtgggctaccccttcatgcctccttattggggcctgggcttccacctgtgcagatggggatacagcagcacagccatcaccagacaggttgtggaaaacatgaccagagcacacttcccactggatgtgcagtggaatgacctggactacatggacagcagaagggacttcaccttcaacaaggatggcttcagagacttccctgccatggtgcaagagctgcaccaagggggcagaagatatatgatgattgtggacccagccatcagctcctctggaccagctggcagctacagaccctatgatgagggactgagaagaggggtgttcatcaccaatgagacaggccagcctctgattggcaaagtgtggccaggctccacagcctttccagatttcacaaaccccacagctctggcttggtgggaagatatggtggcagagttccatgatcaggtgccctttgatggcatgtggattgacatgaatgagcccagcaacttcatcaggggctctgaggatggatgccccaacaatgaactggaaaatcctccttatgtgcctggtgttgttggagggacactgcaggcagccacaatttgtgccagctctcaccagtttctgagcacccactacaacctgcacaatctgtatggcctgactgaggccattgccagccacagggctcttgtgaaggctagaggcaccagaccttttgtgatcagcaggtccacctttgctggccatggcagatatgctggccactggactggggatgtgtggtctagttgggagcagctggctagctctgtgcctgagatcctgcagttcaacctgctgggagtgccccttgttggagcagatgtgtgtggcttcctgggcaacacctcagaggaactgtgtgtcagatggactcagctgggagcattctaccctttcatgagaaaccacaacagcctgctgagcctgcctcaagagccttacagcttttctgagccagcacagcaggccatgagaaaggccctgactctgagatatgccctgctgcctcacctgtacaccctgttccatcaggctcatgtggctggggagactgtggctagacccctgttcctggaattccccaaggacagctccacctggacagtggatcatcagctgctgtggggagaagccctgctgattacacctgtgctgcaggctggcaaggctgaagtgacaggctacttccctcttggcacttggtatgacctgcagacagtgcctgtggaagctctgggatctctgcctccacctcctgctgctcctagagagcctgccattcactctgaaggccagtgggttaccctgcctgctccactggataccatcaatgtgcatctgagagcaggctacatcatccctctgcaaggccctggcctgaccaccacagaatctagacagcagccaatggcactggctgtggccctgaccaaagggggagaagctagaggggagctgttctgggatgatggggagagcctggaagtgctggaaagaggggcctatacacaagtgatttttctggctaggaacaataccattgtgaatgagcttgtcagagtcacctctgaaggtgctggcctgcagctccagaaagtgacagtgcttggagtggccacagcaccccagcaagtgctgtctaatggggtgccagtgtccaacttcacatacagccctgataccaaggtcctggacatctgtgtgtccctgcttatgggagagcagttcctggtgtcttggtgctaataacctctactgtgccttctagttgccagccatctgttgtttgcccctcccccttgccttccttgaccctggaaggtgccactcccactgtcctttcctaataaaatgaggaaattgcatcacattgtctgagtaggtgtcattctattctggggggtggggtggggcaggacagcaagggggaggattgggaagacaatagcaggcatgctggggatgcagtgggctctatggcttctgaggtggaaagaaccagctggggctctagggggtatcccc

SEQ ID NO: 782 - DNA, 3795 bp, synthetic construct
  source 1..3795: mol_type = other DNA
  misc_feature 1..100: note = mAlb_SA
  misc_feature 103..426: note = H1H12847 VK
  misc_feature 427..471: note = 3xG4S
  misc_feature 472..834: note = H1H12847 VH
  misc_feature 835..864: note = 2xG4S
  misc_feature 865..3513: note = GAA (70-952)
  misc_feature 3520..3795: note = bGH pA
taggtcagtgaagagaagaacaaaaagcagcatattacagttagttgtcttcatcaatctttaaatatgttgtgtggtttttctctccctgtttccacagttgacatccagatgacccagagccccagctccctgtcagccagtgtgggtgacagagtgaccatcacctgcagagccagccagagcatcagcagctacctgaactggtaccagcagaaacctggcaaagcccccaagctgctgatttatgctgctagcagcctgcagagtggagtgcccagcagattctcaggcagtggctctggcacagacttcaccctgaccatctccagcctgcagccagaagactttgccacctactactgccagcagagctacagcacccctcctatcacctttggccagggcacaagactggagatcaagggaggaggaggctctggaggaggaggctctggagggggaggctctgaggtccaactggttgaatctggagggggcctggtgcaacctggcaggagcctgagactgagctgtgctgcctctggcttcacctttgatgactatgccatgaactgggtgagacaggcccctggcaagggcctggagtgggtgtctggcatcagctggagctctggcagcatggactatgcagattctgtgaagggcaggttcaccatcagcagagataatgccaagaacagcctgtacctgcagatgaacagcctcaggacagaggacacagccctgtactactgtgccaaggccagagaagtgggtgactactatggcatggatgtgtggggccagggcaccacagtgacagtgagctctgggggaggaggctcaggtgggggtggcagtgcccatcctggcagacctagagctgtgcccacacagtgtgatgtgcctccaaacagcagatttgactgtgcccctgacaaggccatcacacaagagcagtgtgaagccagaggctgctgttacatccctgccaagcaaggactgcaaggggctcagatgggacagccctggtgcttcttcccaccatcttaccccagctacaagctggaaaacctgagcagctctgagatgggctacactgctacactgaccagaaccacacctacattcttcccaaaggacatcctgacactgaggctggatgtgatgatggaaacagagaacaggctgcacttcaccatcaaggaccctgccaatagaagatatgaggtgcccctggaaacccctcatgtgcactctagagccccatctccactgtactctgtggaattttctgaggaaccctttggggtcatagtcagaaggcagctggatggcagagtgctgctgaacacaactgtggcccctctgttctttgctgatcagttcctgcagctgagcaccagcctgcctagccagtatatcacaggcctggcagagcacctgtctccactgatgctgagcacatcctggaccagaatcaccctgtggaacagagacctggctcccacacctggggccaacctgtatggctctcaccccttctatctggccctggaagatggtggttcagcccatggtgtctttctgctgaactccaatgccatggatgtggtgctgcagccctctcctgctctgtcttggagaagcactggtggcatcctggatgtgtacatctttctgggccctgagcctaagtctgtggtgcagcagtacctggatgttgtgggctaccccttcatgcctccttattggggcctgggcttccacctgtgcagatggggatacagcagcacagccatcaccagacaggttgtggaaaacatgaccagagcacacttcccactggatgtgcagtggaatgacctggactacatggacagcagaagggacttcaccttcaacaaggatggcttcagagacttccctgccatggtgcaagagctgcaccaaggtggtagaagatatatgatgattgtggacccagccatcagctcctctggaccagctggcagctacagaccctatgatgagggactgagaagaggggtgttcatcaccaatgagacaggccagcctctgattggcaaagtgtggccaggctccacagcctttccagatttcacaaaccccacagctctggcttggtgggaagatatggtggcagagttccatgatcaggtgccctttgatggcatgtggattgacatgaatgagcccagcaacttcatcaggggctctgaggatggatgccccaacaatgaactggaaaatcctccttatgtgcctggtgttgttggagggacactgcaggcagccacaatttgtgccagctctcaccagtttctgagcacccactacaacctgcacaatctgtatggcctgactgaggccattgccagccacagggctcttgtgaaggctagaggcaccagaccttttgtgatcagcaggtccacctttgctggccatggcagatatgctggccactggactggggatgtgtggtctagttgggagcagctggctagctctgtgcctgagatcctgcagttcaacctgctgggagtgccccttgttggagcagatgtgtgtggcttcctgggcaacacctcagaggaactgtgtgtcagatggactcagctgggagcattctaccctttcatgagaaaccacaacagcctgctgagcctgcctcaagagccttacagcttttctgagccagcacagcaggccatgagaaaggccctgactctgagatatgccctgctgcctcacctgtacaccctgttccatcaggctcatgtggctggggagactgtggctagacccctgttcctggaattccccaaggacagctccacctggacagtggatcatcagctgctgtggggagaagccctgctgattacacctgtgctgcaggctggcaaggctgaagtgacaggctacttccctcttggcacttggtatgacctgcagacagtgcctgtggaagctctgggatctctgcctccacctcctgctgctcctagagagcctgccattcactctgaaggccagtgggttaccctgcctgctccactggataccatcaatgtgcatctgagagcaggctacatcatccctctgcaaggccctggcctgaccaccacagaatctagacagcagccaatggcactggctgtggccctgaccaaaggtggagaagctagaggggagctgttctgggatgatggggagagcctggaagtgctggaaagaggggcctatacacaagtgatttttctggctaggaacaataccattgtgaatgagcttgtcagagtcacctctgaaggtgctggcctgcagctccagaaagtgacagtgcttggagtggccacagcaccccagcaagtgctgtctaatggggtgccagtgtccaacttcacatacagccctgataccaaggtcctggacatctgtgtgtccctgcttatgggagagcagttcctggtgtcttggtgctaataacctctactgtgccttctagttgccagccatctgttgtttgcccctcccccttgccttccttgaccctggaaggtgccactcccactgtcctttcctaataaaatgaggaaattgcatcacattgtctgagtaggtgtcattctattctggggggtggggtggggcaggacagcaagggggaggattgggaagacaatagcaggcatgctggggatgcagtgggctctatggcttctgaggtggaaagaaccagctggggctctagggggtatcccc

SEQ ID NO: 783 - DNA, 3719 bp, synthetic construct
  source 1..3719: mol_type = other DNA
  misc_feature 1..100: note = mAlb SA
  misc_feature 103..453: note = 12450 VH anti-CD63
  misc_feature 454..498: note = 3X G4S linker
  misc_feature 499..822: note = 3-20 ULC light chain VL
  misc_feature 823..837: note = 1X G4S linker
  misc_feature 838..3486: note = GAA CpG
  misc_feature 3493..3719: note = SV40 polyA
taggtcagtgaagagaagaacaaaaagcagcatattacagttagttgtcttcatcaatctttaaatatgttgtgtggtttttctctccctgtttccacagttcaggtccagctgcaagagtctggccccaaggtggtcaagccctctgagacactgagcctgacctgcacagtgtctggtggcagcatcagcagctactactggaactggatcagacagagccctggcaaaggcctggaatggattggctacaccaagagaggctacacagactacaaccccagcctgagaagcagagtgaccatctctgaggacaccagcaagaaccagttcagcctgaggatcagctctgtgacagctgctgacacagcagtgtactactgtgcccagatgggctggggcagccatgcctttgatatgtggggccagggcacaatggtggctgtgtccagtgggggctcaggaggaggtggctcaggaggtggaggttcaggaggggagattgtgctgacccagtctcctggcacactgtctctgagccctggggaaagagccacactgagctgtagagccagccagtctgtgtcctctagctacctggcctggtatcagcagaagcctggacaggctcccagactgctgatctatggggcctcttctagagccacaggcatccctgacagattcagtggcagtggctctggcacagacttcaccctgaccatcagcagactggaacctgaggactttgctgtgtactattgccagcagtatggcagcagcccctggacatttggacagggcaccaaggtggaaatcaaaggtggtggtggctctgcccatcctggcagacctagagctgtgcccacacagtgtgatgtgcctccaaacagcagatttgactgtgcccctgacaaggccatcacacaagagcagtgtgaagccagaggctgctgttacatccctgccaagcaaggactgcaaggggctcagatgggacagccctggtgcttcttcccaccatcttaccccagctacaagctggaaaacctgagcagctctgagatgggctacactgctacactgaccagaaccacacctacattcttcccaaaggacatcctgacactgaggctggatgtgatgatggaaacagagaacaggctgcacttcaccatcaaggaccctgccaatagaagatatgaggtgcccctggaaacccctcatgtgcactctagagccccatctccactgtactctgtggaattttctgaggaaccctttggggtcatagtcagaaggcagctggatggcagagtgctgctgaacacaactgtggcccctctgttctttgctgatcagttcctgcagctgagcaccagcctgcctagccagtatatcacaggcctggcagagcacctgtctccactgatgctgagcacatcctggaccagaatcaccctgtggaacagagacctggctcccacacctggggccaacctgtatggctctcaccccttctatctggccctggaagatggtggttcagcccatggtgtctttctgctgaactccaatgccatggatgtggtgctgcagccctctcctgctctgtcttggagaagcactggtggcatcctggatgtgtacatctttctgggccctgagcctaagtctgtggtgcagcagtacctggatgttgtgggctaccccttcatgcctccttattggggcctgggcttccacctgtgcagatggggatacagcagcacagccatcaccagacaggttgtggaaaacatgaccagagcacacttcccactggatgtgcagtggaatgacctggactacatggacagcagaagggacttcaccttcaacaaggatggcttcagagacttccctgccatggtgcaagagctgcaccaaggtggtagaagatatatgatgattgtggacccagccatcagctcctctggaccagctggcagctacagaccctatgatgagggactgagaagaggggtgttcatcaccaatgagacaggccagcctctgattggcaaagtgtggccaggctccacagcctttccagatttcacaaaccccacagctctggcttggtgggaagatatggtggcagagttccatgatcaggtgccctttgatggcatgtggattgacatgaatgagcccagcaacttcatcaggggctctgaggatggatgccccaacaatgaactggaaaatcctccttatgtgcctggtgttgttggagggacactgcaggcagccacaatttgtgccagctctcaccagtttctgagcacccactacaacctgcacaatctgtatggcctgactgaggccattgccagccacagggctcttgtgaaggctagaggcaccagaccttttgtgatcagcaggtccacctttgctggccatggcagatatgctggccactggactggggatgtgtggtctagttgggagcagctggctagctctgtgcctgagatcctgcagttcaacctgctgggagtgccccttgttggagcagatgtgtgtggcttcctgggcaacacctcagaggaactgtgtgtcagatggactcagctgggagcattctaccctttcatgagaaaccacaacagcctgctgagcctgcctcaagagccttacagcttttctgagccagcacagcaggccatgagaaaggccctgactctgagatatgccctgctgcctcacctgtacaccctgttccatcaggctcatgtggctggggagactgtggctagacccctgttcctggaattccccaaggacagctccacctggacagtggatcatcagctgctgtggggagaagccctgctgattacacctgtgctgcaggctggcaaggctgaagtgacaggctacttccctcttggcacttggtatgacctgcagacagtgcctgtggaagctctgggatctctgcctccacctcctgctgctcctagagagcctgccattcactctgaaggccagtgggttaccctgcctgctccactggataccatcaatgtgcatctgagagcaggctacatcatccctctgcaaggccctggcctgaccaccacagaatctagacagcagccaatggcactggctgtggccctgaccaaaggtggagaagctagaggggagctgttctgggatgatggggagagcctggaagtgctggaaagaggggcctatacacaagtgatttttctggctaggaacaataccattgtgaatgagcttgtcagagtcacctctgaaggtgctggcctgcagctccagaaagtgacagtgcttggagtggccacagcaccccagcaagtgctgtctaatggggtgccagtgtccaacttcacatacagccctgataccaaggtcctggacatctgtgtgtccctgcttatgggagagcagttcctggtgtcttggtgctaataatcagccataccacatttgtagaggttttacttgctttaaaaaacctcccacacctccccctgaacctgaaacataaaatgaatgcaattgttgttgttaacttgtttattgcagcttataatggttacaaataaagcaatagcatcacaaatttcacaaataaagcatttttttcactgcattctagttgtggtttgtccaaactcatcaatgtatcttatcatgtc

SEQ ID NO: 784 - DNA, 3996 bp, synthetic construct
  source 1..3996: mol_type = other DNA
  misc_feature 1..100: note = mAlb_SA
  misc_feature 103..3486: note = 12450 anti-CD63 scFv:GAA
  misc_feature 3493..3768: note = bGH pA
  misc_feature 3770..3996: note = SV40_late_polyA
taggtcagtgaagagaagaacaaaaagcagcatattacagttagttgtcttcatcaatctttaaatatgttgtgtggtttttctctccctgtttccacagttcaggtccagctgcaagagtctggccccaaggtggtcaagccctctgagacactgagcctgacctgcacagtgtctggtggcagcatcagcagctactactggaactggatcagacagagccctggcaaaggcctggaatggattggctacaccaagagaggctacacagactacaaccccagcctgagaagcagagtgaccatctctgaggacaccagcaagaaccagttcagcctgaggatcagctctgtgacagctgctgacacagcagtttactactgtgcccagatgggctggggcagccatgcctttgatatgtggggccagggcacaatggtggctgtgtccagtgggggctcaggaggaggtggctcaggaggtggaggttcaggaggggagattgtgctgacccagtctcctggcacactgtctctgagccctggggaaagagccacactgagctgtagagccagccagtctgtgtcctctagctacctggcctggtatcagcagaagcctggacaggctcccagactgctgatctatggggcctcttctagagccacaggcatccctgacagattcagtggcagtggctctggcacagacttcaccctgaccatcagcagactggaacctgaggactttgctgtgtactattgccagcagtatggcagcagcccctggacatttggacagggcaccaaggtggaaatcaaagggggtggtggctctgcccatcctggcagacctagagctgtgcccacacagtgtgatgtgcctccaaacagcagatttgactgtgcccctgacaaggccatcacacaagagcagtgtgaagccagaggctgctgttacatccctgccaagcaaggactgcaaggggctcagatgggacagccctggtgcttcttcccaccatcttaccccagctacaagctggaaaacctgagcagctctgagatgggctacactgctacactgaccagaaccacacctacattcttcccaaaggacatcctgacactgaggctggatgtgatgatggaaacagagaacaggctgcacttcaccatcaaggaccctgccaatagaagatatgaggtgcccctggaaacccctcatgtgcactctagagccccatctccactgtactctgtggaattttctgaggaaccctttggggtcatagtcagaaggcagctggatggcagagtgctgctgaacacaactgtggcccctctgttctttgctgatcagttcctgcagctgagcaccagcctgcctagccagtatatcacaggcctggcagagcacctgtctccactgatgctgagcacatcctggaccagaatcaccctgtggaacagagacctggctcccacacctggggccaacctgtatggctctcaccccttctatctggccctggaagatggtggttcagcccatggtgtctttctgctgaactccaatgccatggatgtggtgctgcagccctctcctgctctgtcttggagaagcactggtggcatcctggatgtgtacatctttctgggccctgagcctaagtctgtggtgcagcagtacctggatgttgtgggctaccccttcatgcctccttattggggcctgggcttccacctgtgcagatggggatacagcagcacagccatcaccagacaggttgtggaaaacatgaccagagcacacttcccactggatgtgcagtggaatgacctggactacatggacagcagaagggacttcaccttcaacaaggatggcttcagagacttccctgccatggtgcaagagctgcaccaagggggcagaagatatatgatgattgtggacccagccatcagctcctctggaccagctggcagctacagaccctatgatgagggactgagaagaggggtgttcatcaccaatgagacaggccagcctctgattggcaaagtgtggccaggctccacagcctttccagatttcacaaaccccacagctctggcttggtgggaagatatggtggcagagttccatgatcaggtgccctttgatggcatgtggattgacatgaatgagcccagcaacttcatcaggggctctgaggatggatgccccaacaatgaactggaaaatcctccttatgtgcctggtgttgttggagggacactgcaggcagccacaatttgtgccagctctcaccagtttctgagcacccactacaacctgcacaatctgtatggcctgactgaggccattgccagccacagggctcttgtgaaggctagaggcaccagaccttttgtgatcagcaggtccacctttgctggccatggcagatatgctggccactggactggggatgtgtggtctagttgggagcagctggctagctctgtgcctgagatcctgcagttcaacctgctgggagtgccccttgttggagcagatgtgtgtggcttcctgggcaacacctcagaggaactgtgtgtcagatggactcagctgggagcattctaccctttcatgagaaaccacaacagcctgctgagcctgcctcaagagccttacagcttttctgagccagcacagcaggccatgagaaaggccctgactctgagatatgccctgctgcctcacctgtacaccctgttccatcaggctcatgtggctggggagactgtggctagacccctgttcctggaattccccaaggacagctccacctggacagtggatcatcagctgctgtggggagaagccctgctgattacacctgtgctgcaggctggcaaggctgaagtgacaggctacttccctcttggcacttggtatgacctgcagacagtgcctgtggaagctctgggatctctgcctccacctcctgctgctcctagagagcctgccattcactctgaaggccagtgggttaccctgcctgctccactggataccatcaatgtgcatctgagagcaggctacatcatccctctgcaaggccctggcctgaccaccacagaatctagacagcagccaatggcactggctgtggccctgaccaaagggggagaagctagaggggagctgttctgggatgatggggagagcctggaagtgctggaaagaggggcctatacacaagtgatttttctggctaggaacaataccattgtgaatgagcttgtcagagtcacctctgaaggtgctggcctgcagctccagaaagtgacagtgcttggagtggccacagcaccccagcaagtgctgtctaatggggtgccagtgtccaacttcacatacagccctgataccaaggtcctggacatctgtgtgtccctgcttatgggagagcagttcctggtgtcttggtgctaataacctctactgtgccttctagttgccagccatctgttgtttgcccctcccccttgccttccttgaccctggaaggtgccactcccactgtcctttcctaataaaatgaggaaattgcatcacattgtctgagtaggtgtcattctattctggggggtggggtggggcaggacagcaagggggaggattgggaagacaatagcaggcatgctggggatgcagtgggctctatggcttctgaggtggaaagaaccagctggggctctagggggtatccccagacatgataagatacattgatgagtttggacaaaccacaactagaatgcagtgaaaaaaatgcttgatttgtgaaatttgtgatgctattgcttgatttgtaaccattataagctgcaataaacaagttaacaacaacaattgcattcattttatgtttcaggttcagggggaggtgtgggaggttttttaaagcaagtaaaacctctacaaatgtggtatggctga

SEQ ID NO: 785 - DNA, 3768 bp, synthetic construct
  source 1..3768: mol_type = other DNA
  misc_feature 1..100: note = mAlb SA
  misc_feature 103..3486: note = 12450 anti-CD63 scFv:GAA
  misc_feature 3493..3768: note = bGH pA
taggtcagtgaagagaagaacaaaaagcagcatattacagttagttgtcttcatcaatctttaaatatgttgtgtggtttttctctccctgtttccacagttcaggtccagctgcaagagtctggccccaaggtggtcaagccctctgagacactgagcctgacctgcacagtgtctggtggcagcatcagcagctactactggaactggatcagacagagccctggcaaaggcctggaatggattggctacaccaagagaggctacacagactacaaccccagcctgagaagcagagtgaccatctctgaggacaccagcaagaaccagttcagcctgaggatcagctctgtgacagctgctgacacagcagtttactactgtgcccagatgggctggggcagccatgcctttgatatgtggggccagggcacaatggtggctgtgtccagtgggggctcaggaggaggtggctcaggaggtggaggttcaggaggggagattgtgctgacccagtctcctggcacactgtctctgagccctggggaaagagccacactgagctgtagagccagccagtctgtgtcctctagctacctggcctggtatcagcagaagcctggacaggctcccagactgctgatctatggggcctcttctagagccacaggcatccctgacagattcagtggcagtggctctggcacagacttcaccctgaccatcagcagactggaacctgaggactttgctgtgtactattgccagcagtatggcagcagcccctggacatttggacagggcaccaaggtggaaatcaaagggggtggtggctctgcccatcctggcagacctagagctgtgcccacacagtgtgatgtgcctccaaacagcagatttgactgtgcccctgacaaggccatcacacaagagcagtgtgaagccagaggctgctgttacatccctgccaagcaaggactgcaaggggctcagatgggacagccctggtgcttcttcccaccatcttaccccagctacaagctggaaaacctgagcagctctgagatgggctacactgctacactgaccagaaccacacctacattcttcccaaaggacatcctgacactgaggctggatgtgatgatggaaacagagaacaggctgcacttcaccatcaaggaccctgccaatagaagatatgaggtgcccctggaaacccctcatgtgcactctagagccccatctccactgtactctgtggaattttctgaggaaccctttggggtcatagtcagaaggcagctggatggcagagtgctgctgaacacaactgtggcccctctgttctttgctgatcagttcctgcagctgagcaccagcctgcctagccagtatatcacaggcctggcagagcacctgtctccactgatgctgagcacatcctggaccagaatcaccctgtggaacagagacctggctcccacacctggggccaacctgtatggctctcaccccttctatctggccctggaagatggtggttcagcccatggtgtctttctgctgaactccaatgccatggatgtggtgctgcagccctctcctgctctgtcttggagaagcactggtggcatcctggatgtgtacatctttctgggccctgagcctaagtctgtggtgcagcagtacctggatgttgtgggctaccccttcatgcctccttattggggcctgggcttccacctgtgcagatggggatacagcagcacagccatcaccagacaggttgtggaaaacatgaccagagcacacttcccactggatgtgcagtggaatgacctggactacatggacagcagaagggacttcaccttcaacaaggatggcttcagagacttccctgccatggtgcaagagctgcaccaagggggcagaagatatatgatgattgtggacccagccatcagctcctctggaccagctggcagctacagaccctatgatgagggactgagaagaggggtgttcatcaccaatgagacaggccagcctctgattggcaaagtgtggccaggctccacagcctttccagatttcacaaaccccacagctctggcttggtgggaagatatggtggcagagttccatgatcaggtgccctttgatggcatgtggattgacatgaatgagcccagcaacttcatcaggggctctgaggatggatgccccaacaatgaactggaaaatcctccttatgtgcctggtgttgttggagggacactgcaggcagccacaatttgtgccagctctcaccagtttctgagcacccactacaacctgcacaatctgtatggcctgactgaggccattgccagccacagggctcttgtgaaggctagaggcaccagaccttttgtgatcagcaggtccacctttgctggccatggcagatatgctggccactggactggggatgtgtggtctagttgggagcagctggctagctctgtgcctgagatcctgcagttcaacctgctgggagtgccccttgttggagcagatgtgtgtggcttcctgggcaacacctcagaggaactgtgtgtcagatggactcagctgggagcattctaccctttcatgagaaaccacaacagcctgctgagcctgcctcaagagccttacagcttttctgagccagcacagcaggccatgagaaaggccctgactctgagatatgccctgctgcctcacctgtacaccctgttccatcaggctcatgtggctggggagactgtggctagacccctgttcctggaattccccaaggacagctccacctggacagtggatcatcagctgctgtggggagaagccctgctgattacacctgtgctgcaggctggcaaggctgaagtgacaggctacttccctcttggcacttggtatgacctgcagacagtgcctgtggaagctctgggatctctgcctccacctcctgctgctcctagagagcctgccattcactctgaaggccagtgggttaccctgcctgctccactggataccatcaatgtgcatctgagagcaggctacatcatccctctgcaaggccctggcctgaccaccacagaatctagacagcagccaatggcactggctgtggccctgaccaaagggggagaagctagaggggagctgttctgggatgatggggagagcctggaagtgctggaaagaggggcctatacacaagtgatttttctggctaggaacaataccattgtgaatgagcttgtcagagtcacctctgaaggtgctggcctgcagctccagaaagtgacagtgcttggagtggccacagcaccccagcaagtgctgtctaatggggtgccagtgtccaacttcacatacagccctgataccaaggtcctggacatctgtgtgtccctgcttatgggagagcagttcctggtgtcttggtgctaataacctctactgtgccttctagttgccagccatctgttgtttgcccctcccccttgccttccttgaccctggaaggtgccactcccactgtcctttcctaataaaatgaggaaattgcatcacattgtctgagtaggtgtcattctattctggggggtggggtggggcaggacagcaagggggaggattgggaagacaatagcaggcatgctggggatgcagtgggctctatggcttctgaggtggaaagaaccagctggggctctagggggtatcccc

SEQ ID NO: 786 - DNA, 3995 bp, synthetic construct
  source 1..3995: mol_type = other DNA
  misc_feature 1..100: note = mAlb_SA
  misc_feature 103..3486: note = 12450 anti-CD63 scFv:GAA
  misc_feature 3493..3768: note = bGH_pA
  misc_feature 3769..3995: note = SV40_late_polyA
taggtcagtgaagagaagaacaaaaagcagcatattacagttagttgtcttcatcaatctttaaatatgttgtgtggtttttctctccctgtttccacagttcaggtccagctgcaagagtctggccccaaggtggtcaagccctctgagacactgagcctgacctgcacagtgtctggtggcagcatcagcagctactactggaactggatcagacagagccctggcaaaggcctggaatggattggctacaccaagagaggctacacagactacaaccccagcctgagaagcagagtgaccatctctgaggacaccagcaagaaccagttcagcctgaggatcagctctgtgacagctgctgacacagcagtgtactactgtgcccagatgggctggggcagccatgcctttgatatgtggggccagggcacaatggtggctgtgtccagtgggggctcaggaggaggtggctcaggaggtggaggttcaggaggggagattgtgctgacccagtctcctggcacactgtctctgagccctggggaaagagccacactgagctgtagagccagccagtctgtgtcctctagctacctggcctggtatcagcagaagcctggacaggctcccagactgctgatctatggggcctcttctagagccacaggcatccctgacagattcagtggcagtggctctggcacagacttcaccctgaccatcagcagactggaacctgaggactttgctgtgtactattgccagcagtatggcagcagcccctggacatttggacagggcaccaaggtggaaatcaaaggtggtggtggctctgcccatcctggcagacctagagctgtgcccacacagtgtgatgtgcctccaaacagcagatttgactgtgcccctgacaaggccatcacacaagagcagtgtgaagccagaggctgctgttacatccctgccaagcaaggactgcaaggggctcagatgggacagccctggtgcttcttcccaccatcttaccccagctacaagctggaaaacctgagcagctctgagatgggctacactgctacactgaccagaaccacacctacattcttcccaaaggacatcctgacactgaggctggatgtgatgatggaaacagagaacaggctgcacttcaccatcaaggaccctgccaatagaagatatgaggtgcccctggaaacccctcatgtgcactctagagccccatctccactgtactctgtggaattttctgaggaaccctttggggtcatagtcagaaggcagctggatggcagagtgctgctgaacacaactgtggcccctctgttctttgctgatcagttcctgcagctgagcaccagcctgcctagccagtatatcacaggcctggcagagcacctgtctccactgatgctgagcacatcctggaccagaatcaccctgtggaacagagacctggctcccacacctggggccaacctgtatggctctcaccccttctatctggccctggaagatggtggttcagcccatggtgtctttctgctgaactccaatgccatggatgtggtgctgcagccctctcctgctctgtcttggagaagcactggtggcatcctggatgtgtacatctttctgggccctgagcctaagtctgtggtgcagcagtacctggatgttgtgggctaccccttcatgcctccttattggggcctgggcttccacctgtgcagatggggatacagcagcacagccatcaccagacaggttgtggaaaacatgaccagagcacacttcccactggatgtgcagtggaatgacctggactacatggacagcagaagggacttcaccttcaacaaggatggcttcagagacttccctgccatggtgcaagagctgcaccaaggtggtagaagatatatgatgattgtggacccagccatcagctcctctggaccagctggcagctacagaccctatgatgagggactgagaagaggggtgttcatcaccaatgagacaggccagcctctgattggcaaagtgtggccaggctccacagcctttccagatttcacaaaccccacagctctggcttggtgggaagatatggtggcagagttccatgatcaggtgccctttgatggcatgtggattgacatgaatgagcccagcaacttcatcaggggctctgaggatggatgccccaacaatgaactggaaaatcctccttatgtgcctggtgttgttggagggacactgcaggcagccacaatttgtgccagctctcaccagtttctgagcacccactacaacctgcacaatctgtatggcctgactgaggccattgccagccacagggctcttgtgaaggctagaggcaccagaccttttgtgatcagcaggtccacctttgctggccatggcagatatgctggccactggactggggatgtgtggtctagttgggagcagctggctagctctgtgcctgagatcctgcagttcaacctgctgggagtgccccttgttggagcagatgtgtgtggcttcctgggcaacacctcagaggaactgtgtgtcagatggactcagctgggagcattctaccctttcatgagaaaccacaacagcctgctgagcctgcctcaagagccttacagcttttctgagccagcacagcaggccatgagaaaggccctgactctgagatatgccctgctgcctcacctgtacaccctgttccatcaggctcatgtggctggggagactgtggctagacccctgttcctggaattccccaaggacagctccacctggacagtggatcatcagctgctgtggggagaagccctgctgattacacctgtgctgcaggctggcaaggctgaagtgacaggctacttccctcttggcacttggtatgacctgcagacagtgcctgtggaagctctgggatctctgcctccacctcctgctgctcctagagagcctgccattcactctgaaggccagtgggttaccctgcctgctccactggataccatcaatgtgcatctgagagcaggctacatcatccctctgcaaggccctggcctgaccaccacagaatctagacagcagccaatggcactggctgtggccctgaccaaagggggagaagctagaggggagctgttctgggatgatggggagagcctggaagtgctggaaagaggggcctatacacaagtgatttttctggctaggaacaataccattgtgaatgagcttgtcagagtcacctctgaaggtgctggcctgcagctccagaaagtgacagtgcttggagtggccacagcaccccagcaagtgctgtctaatggggtgccagtgtccaacttcacatacagccctgataccaaggtcctggacatctgtgtgtccctgcttatgggagagcagttcctggtgtcttggtgctaataacctctactgtgccttctagttgccagccatctgttgtttgcccctcccccttgccttccttgaccctggaaggtgccactcccactgtcctttcctaataaaatgaggaaattgcatcacattgtctgagtaggtgtcattctattctggggggtggggtggggcaggacagcaagggggaggattgggaagacaatagcaggcatgctggggatgcagtgggctctatggcttctgaggtggaaagaaccagctggggctctagggggtatccccgacatgataagatacattgatgagtttggacaaaccacaactagaatgcagtgaaaaaaatgcttgatttgtgaaatttgtgatgctattgcttgatttgtaaccattataagctgcaataaacaagttaacaacaacaattgcattcattttatgtttcaggttcagggggaggtgtgggaggttttttaaagcaagtaaaacctctacaaatgtggtatggctga

SEQ ID NO: 787 - DNA, 3768 bp, synthetic construct
  source 1..3768: mol_type = other DNA
  misc_feature 1..100: note = mAlb_SA
  misc_feature 103..3486: note = 12450 anti-CD63 scFv:GAA
  misc_feature 3493..3768: note = bGH_pA
taggtcagtgaagagaagaacaaaaagcagcatattacagttagttgtcttcatcaatctttaaatatgttgtgtggtttttctctccctgtttccacagttcaggtccagctgcaagagtctggccccaaggtggtcaagccctctgagacactgagcctgacctgcacagtgtctggtggcagcatcagcagctactactggaactggatcagacagagccctggcaaaggcctggaatggattggctacaccaagagaggctacacagactacaaccccagcctgagaagcagagtgaccatctctgaggacaccagcaagaaccagttcagcctgaggatcagctctgtgacagctgctgacacagcagtgtactactgtgcccagatgggctggggcagccatgcctttgatatgtggggccagggcacaatggtggctgtgtccagtgggggctcaggaggaggtggctcaggaggtggaggttcaggaggggagattgtgctgacccagtctcctggcacactgtctctgagccctggggaaagagccacactgagctgtagagccagccagtctgtgtcctctagctacctggcctggtatcagcagaagcctggacaggctcccagactgctgatctatggggcctcttctagagccacaggcatccctgacagattcagtggcagtggctctggcacagacttcaccctgaccatcagcagactggaacctgaggactttgctgtgtactattgccagcagtatggcagcagcccctggacatttggacagggcaccaaggtggaaatcaaaggtggtggtggctctgcccatcctggcagacctagagctgtgcccacacagtgtgatgtgcctccaaacagcagatttgactgtgcccctgacaaggccatcacacaagagcagtgtgaagccagaggctgctgttacatccctgccaagcaaggactgcaaggggctcagatgggacagccctggtgcttcttcccaccatcttaccccagctacaagctggaaaacctgagcagctctgagatgggctacactgctacactgaccagaaccacacctacattcttcccaaaggacatcctgacactgaggctggatgtgatgatggaaacagagaacaggctgcacttcaccatcaaggaccctgccaatagaagatatgaggtgcccctggaaacccctcatgtgcactctagagccccatctccactgtactctgtggaattttctgaggaaccctttggggtcatagtcagaaggcagctggatggcagagtgctgctgaacacaactgtggcccctctgttctttgctgatcagttcctgcagctgagcaccagcctgcctagccagtatatcacaggcctggcagagcacctgtctccactgatgctgagcacatcctggaccagaatcaccctgtggaacagagacctggctcccacacctggggccaacctgtatggctctcaccccttctatctggccctggaagatggtggttcagcccatggtgtctttctgctgaactccaatgccatggatgtggtgctgcagccctctcctgctctgtcttggagaagcactggtggcatcctggatgtgtacatctttctgggccctgagcctaagtctgtggtgcagcagtacctggatgttgtgggctaccccttcatgcctccttattggggcctgggcttccacctgtgcagatggggatacagcagcacagccatcaccagacaggttgtggaaaacatgaccagagcacacttcccactggatgtgcagtggaatgacctggactacatggacagcagaagggacttcaccttcaacaaggatggcttcagagacttccctgccatggtgcaagagctgcaccaaggtggtagaagatatatgatgattgtggacccagccatcagctcctctggaccagctggcagctacagaccctatgatgagggactgagaagaggggtgttcatcaccaatgagacaggccagcctctgattggcaaagtgtggccaggctccacagcctttccagatttcacaaaccccacagctctggcttggtgggaagatatggtggcagagttccatgatcaggtgccctttgatggcatgtggattgacatgaatgagcccagcaacttcatcaggggctctgaggatggatgccccaacaatgaactggaaaatcctccttatgtgcctggtgttgttggagggacactgcaggcagccacaatttgtgccagctctcaccagtttctgagcacccactacaacctgcacaatctgtatggcctgactgaggccattgccagccacagggctcttgtgaaggctagaggcaccagaccttttgtgatcagcaggtccacctttgctggccatggcagatatgctggccactggactggggatgtgtggtctagttgggagcagctggctagctctgtgcctgagatcctgcagttcaacctgctgggagtgccccttgttggagcagatgtgtgtggcttcctgggcaacacctcagaggaactgtgtgtcagatggactcagctgggagcattctaccctttcatgagaaaccacaacagcctgctgagcctgcctcaagagccttacagcttttctgagccagcacagcaggccatgagaaaggccctgactctgagatatgccctgctgcctcacctgtacaccctgttccatcaggctcatgtggctggggagactgtggctagacccctgttcctggaattccccaaggacagctccacctggacagtggatcatcagctgctgtggggagaagccctgctgattacacctgtgctgcaggctggcaaggctgaagtgacaggctacttccctcttggcacttggtatgacctgcagacagtgcctgtggaagctctgggatctctgcctccacctcctgctgctcctagagagcctgccattcactctgaaggccagtgggttaccctgcctgctccactggataccatcaatgtgcatctgagagcaggctacatcatccctctgcaaggccctggcctgaccaccacagaatctagacagcagccaatggcactggctgtggccctgaccaaagggggagaagctagaggggagctgttctgggatgatggggagagcctggaagtgctggaaagaggggcctatacacaagtgatttttctggctaggaacaataccattgtgaatgagcttgtcagagtcacctctgaaggtgctggcctgcagctccagaaagtgacagtgcttggagtggccacagcaccccagcaagtgctgtctaatggggtgccagtgtccaacttcacatacagccctgataccaaggtcctggacatctgtgtgtccctgcttatgggagagcagttcctggtgtcttggtgctaataacctctactgtgccttctagttgccagccatctgttgtttgcccctcccccttgccttccttgaccctggaaggtgccactcccactgtcctttcctaataaaatgaggaaattgcatcacattgtctgagtaggtgtcattctattctggggggtggggtggggcaggacagcaagggggaggattgggaagacaatagcaggcatgctggggatgcagtgggctctatggcttctgaggtggaaagaaccagctggggctctagggggtatcccc

SEQ ID NO: 788 - DNA, 3768 bp, synthetic construct
  source 1..3768: mol_type = other DNA
  misc_feature 1..100: note = mAlb_SA
  misc_feature 103..3486: note = 12450 anti-CD63 scFv:GAA
  misc_feature 3493..3768: note = bGH pA
taggtcagtgaagagaagaacaaaaagcagcatattacagttagttgtcttcatcaatctttaaatatgttgtgtggtttttctctccctgtttccacagttcaggtccagctgcaagagtctggccccaaggtggtcaagccctctgagacactgagcctgacctgcacagtgtctggtggcagcatcagcagctactactggaactggatcagacagagccctggcaaaggcctggaatggattggctacaccaagagaggctacacagactacaaccccagcctgagaagcagagtgaccatctctgaggacaccagcaagaaccagttcagcctgaggatcagctctgtgacagctgctgacacagcagtgtactactgtgcccagatgggctggggcagccatgcctttgatatgtggggccagggcacaatggtggctgtgtccagtgggggctcaggaggaggtggctcaggaggtggaggttcaggaggggagattgtgctgacccagtctcctggcacactgtctctgagccctggggaaagagccacactgagctgtagagccagccagtctgtgtcctctagctacctggcctggtatcagcagaagcctggacaggctcccagactgctgatctatggggcctcttctagagccacaggcatccctgacagattcagtggcagtggctctggcacagacttcaccctgaccatcagcagactggaacctgaggactttgctgtgtactattgccagcagtatggcagcagcccctggacatttggacagggcaccaaggtggaaatcaaaggtggtggtggctctgcccatcctggcagacctagagctgtgcccacacagtgtgatgtgcctccaaacagcagatttgactgtgcccctgacaaggccatcacacaagagcagtgtgaagccagaggctgctgttacatccctgccaagcaaggactgcaaggggctcagatgggacagccctggtgcttcttcccaccatcttaccccagctacaagctggaaaacctgagcagctctgagatgggctacactgctacactgaccagaaccacacctacattcttcccaaaggacatcctgacactgaggctggatgtgatgatggaaacagagaacaggctgcacttcaccatcaaggaccctgccaatagaagatatgaggtgcccctggaaacccctcatgtgcactctagagccccatctccactgtactctgtggaattttctgaggaaccctttggggtcatagtcagaaggcagctggatggcagagtgctgctgaacacaactgtggcccctctgttctttgctgatcagttcctgcagctgagcaccagcctgcctagccagtatatcacaggcctggcagagcacctgtctccactgatgctgagcacatcctggaccagaatcaccctgtggaacagagacctggctcccacacctggggccaacctgtatggctctcaccccttctatctggccctggaagatggtggttcagcccatggtgtctttctgctgaactccaatgccatggatgtggtgctgcagccctctcctgctctgtcttggagaagcactggtggcatcctggatgtgtacatctttctgggccctgagcctaagtctgtggtgcagcagtacctggatgttgtgggctaccccttcatgcctccttattggggcctgggcttccacctgtgcagatggggatacagcagcacagccatcaccagacaggttgtggaaaacatgaccagagcacacttcccactggatgtgcagtggaatgacctggactacatggacagcagaagggacttcaccttcaacaaggatggcttcagagacttccctgccatggtgcaagagctgcaccaaggtggtagaagatatatgatgattgtggacccagccatcagctcctctggaccagctggcagctacagaccctatgatgagggactgagaagaggggtgttcatcaccaatgagacaggccagcctctgattggcaaagtgtggccaggctccacagcctttccagatttcacaaaccccacagctctggcttggtgggaagatatggtggcagagttccatgatcaggtgccctttgatggcatgtggattgacatgaatgagcccagcaacttcatcaggggctctgaggatggatgccccaacaatgaactggaaaatcctccttatgtgcctggtgttgttggagggacactgcaggcagccacaatttgtgccagctctcaccagtttctgagcacccactacaacctgcacaatctgtatggcctgactgaggccattgccagccacagggctcttgtgaaggctagaggcaccagaccttttgtgatcagcaggtccacctttgctggccatggcagatatgctggccactggactggggatgtgtggtctagttgggagcagctggctagctctgtgcctgagatcctgcagttcaacctgctgggagtgccccttgttggagcagatgtgtgtggcttcctgggcaacacctcagaggaactgtgtgtcagatggactcagctgggagcattctaccctttcatgagaaaccacaacagcctgctgagcctgcctcaagagccttacagcttttctgagccagcacagcaggccatgagaaaggccctgactctgagatatgccctgctgcctcacctgtacaccctgttccatcaggctcatgtggctggggagactgtggctagacccctgttcctggaattccccaaggacagctccacctggacagtggatcatcagctgctgtggggagaagccctgctgattacacctgtgctgcaggctggcaaggctgaagtgacaggctacttccctcttggcacttggtatgacctgcagacagtgcctgtggaagctctgggatctctgcctccacctcctgctgctcctagagagcctgccattcactctgaaggccagtgggttaccctgcctgctccactggataccatcaatgtgcatctgagagcaggctacatcatccctctgcaaggccctggcctgaccaccacagaatctagacagcagccaatggcactggctgtggccctgaccaaaggtggagaagctagaggggagctgttctgggatgatggggagagcctggaagtgctggaaagaggggcctatacacaagtgatttttctggctaggaacaataccattgtgaatgagcttgtcagagtcacctctgaaggtgctggcctgcagctccagaaagtgacagtgcttggagtggccacagcaccccagcaagtgctgtctaatggggtgccagtgtccaacttcacatacagccctgataccaaggtcctggacatctgtgtgtccctgcttatgggagagcagttcctggtgtcttggtgctaataacctctactgtgccttctagttgccagccatctgttgtttgcccctcccccttgccttccttgaccctggaaggtgccactcccactgtcctttcctaataaaatgaggaaattgcatcacattgtctgagtaggtgtcattctattctggggggtggggtggggcaggacagcaagggggaggattgggaagacaatagcaggcatgctggggatgcagtgggctctatggcttctgaggtggaaagaaccagctggggctctagggggtatcccc

SEQ ID NO: 789 - DNA, 3817 bp, synthetic construct
  source 1..3817: mol_type = other DNA
  misc_feature 1..100: note = mAlb SA
  misc_feature 103..3486: note = 12450 anti-CD63 scFv:GAA
  misc_feature 3493..3768: note = bGH pA
  misc_feature 3769..3817: note = sPA
taggtcagtgaagagaagaacaaaaagcagcatattacagttagttgtcttcatcaatctttaaatatgttgtgtggtttttctctccctgtttccacagttcaggtccagctgcaagagtctggccccaaggtggtcaagccctctgagacactgagcctgacctgcacagtgtctggtggcagcatcagcagctactactggaactggatcagacagagccctggcaaaggcctggaatggattggctacaccaagagaggctacacagactacaaccccagcctgagaagcagagtgaccatctctgaggacaccagcaagaaccagttcagcctgaggatcagctctgtgacagctgctgacacagcagtgtactactgtgcccagatgggctggggcagccatgcctttgatatgtggggccagggcacaatggtggctgtgtccagtgggggctcaggaggaggtggctcaggaggtggaggttcaggaggggagattgtgctgacccagtctcctggcacactgtctctgagccctggggaaagagccacactgagctgtagagccagccagtctgtgtcctctagctacctggcctggtatcagcagaagcctggacaggctcccagactgctgatctatggggcctcttctagagccacaggcatccctgacagattcagtggcagtggctctggcacagacttcaccctgaccatcagcagactggaacctgaggactttgctgtgtactattgccagcagtatggcagcagcccctggacatttggacagggcaccaaggtggaaatcaaaggtggtggtggctctgcccatcctggcagacctagagctgtgcccacacagtgtgatgtgcctccaaacagcagatttgactgtgcccctgacaaggccatcacacaagagcagtgtgaagccagaggctgctgttacatccctgccaagcaaggactgcaaggggctcagatgggacagccctggtgcttcttcccaccatcttaccccagctacaagctggaaaacctgagcagctctgagatgggctacactgctacactgaccagaaccacacctacattcttcccaaaggacatcctgacactgaggctggatgtgatgatggaaacagagaacaggctgcacttcaccatcaaggaccctgccaatagaagatatgaggtgcccctggaaacccctcatgtgcactctagagccccatctccactgtactctgtggaattttctgaggaaccctttggggtcatagtcagaaggcagctggatggcagagtgctgctgaacacaactgtggcccctctgttctttgctgatcagttcctgcagctgagcaccagcctgcctagccagtatatcacaggcctggcagagcacctgtctccactgatgctgagcacatcctggaccagaatcaccctgtggaacagagacctggctcccacacctggggccaacctgtatggctctcaccccttctatctggccctggaagatggtggttcagcccatggtgtctttctgctgaactccaatgccatggatgtggtgctgcagccctctcctgctctgtcttggagaagcactggtggcatcctggatgtgtacatctttctgggccctgagcctaagtctgtggtgcagcagtacctggatgttgtgggctaccccttcatgcctccttattggggcctgggcttccacctgtgcagatggggatacagcagcacagccatcaccagacaggttgtggaaaacatgaccagagcacacttcccactggatgtgcagtggaatgacctggactacatggacagcagaagggacttcaccttcaacaaggatggcttcagagacttccctgccatggtgcaagagctgcaccaaggtggtagaagatatatgatgattgtggacccagccatcagctcctctggaccagctggcagctacagaccctatgatgagggactgagaagaggggtgttcatcaccaatgagacaggccagcctctgattggcaaagtgtggccaggctccacagcctttccagatttcacaaaccccacagctctggcttggtgggaagatatggtggcagagttccatgatcaggtgccctttgatggcatgtggattgacatgaatgagcccagcaacttcatcaggggctctgaggatggatgccccaacaatgaactggaaaatcctccttatgtgcctggtgttgttggagggacactgcaggcagccacaatttgtgccagctctcaccagtttctgagcacccactacaacctgcacaatctgtatggcctgactgaggccattgccagccacagggctcttgtgaaggctagaggcaccagaccttttgtgatcagcaggtccacctttgctggccatggcagatatgctggccactggactggggatgtgtggtctagttgggagcagctggctagctctgtgcctgagatcctgcagttcaacctgctgggagtgccccttgttggagcagatgtgtgtggcttcctgggcaacacctcagaggaactgtgtgtcagatggactcagctgggagcattctaccctttcatgagaaaccacaacagcctgctgagcctgcctcaagagccttacagcttttctgagccagcacagcaggccatgagaaaggccctgactctgagatatgccctgctgcctcacctgtacaccctgttccatcaggctcatgtggctggggagactgtggctagacccctgttcctggaattccccaaggacagctccacctggacagtggatcatcagctgctgtggggagaagccctgctgattacacctgtgctgcaggctggcaaggctgaagtgacaggctacttccctcttggcacttggtatgacctgcagacagtgcctgtggaagctctgggatctctgcctccacctcctgctgctcctagagagcctgccattcactctgaaggccagtgggttaccctgcctgctccactggataccatcaatgtgcatctgagagcaggctacatcatccctctgcaaggccctggcctgaccaccacagaatctagacagcagccaatggcactggctgtggccctgaccaaaggtggagaagctagaggggagctgttctgggatgatggggagagcctggaagtgctggaaagaggggcctatacacaagtgatttttctggctaggaacaataccattgtgaatgagcttgtcagagtcacctctgaaggtgctggcctgcagctccagaaagtgacagtgcttggagtggccacagcaccccagcaagtgctgtctaatggggtgccagtgtccaacttcacatacagccctgataccaaggtcctggacatctgtgtgtccctgcttatgggagagcagttcctggtgtcttggtgctaataacctctactgtgccttctagttgccagccatctgttgtttgcccctcccccttgccttccttgaccctggaaggtgccactcccactgtcctttcctaataaaatgaggaaattgcatcacattgtctgagtaggtgtcattctattctggggggtggggtggggcaggacagcaagggggaggattgggaagacaatagcaggcatgctggggatgcagtgggctctatggcttctgaggtggaaagaaccagctggggctctagggggtatccccaataaaagatctttattttcattagatctgtgtgttggttttttgtgtg

SEQ ID NO: 790 - DNA, 4417 bp, synthetic construct
  source 1..4417: mol_type = other DNA
  misc_feature 1..100: note = mAlb SA
  misc_feature 103..3486: note = 12450 anti-CD63 scFv:GAA
  misc_feature 3493..3768: note = bGH pA
  misc_feature 3769..4368: note = Stuffer
  misc_feature 4369..4417: note = sPA
taggtcagtgaagagaagaacaaaaagcagcatattacagttagttgtcttcatcaatctttaaatatgttgtgtggtttttctctccctgtttccacagttcaggtccagctgcaagagtctggccccaaggtggtcaagccctctgagacactgagcctgacctgcacagtgtctggtggcagcatcagcagctactactggaactggatcagacagagccctggcaaaggcctggaatggattggctacaccaagagaggctacacagactacaaccccagcctgagaagcagagtgaccatctctgaggacaccagcaagaaccagttcagcctgaggatcagctctgtgacagctgctgacacagcagtgtactactgtgcccagatgggctggggcagccatgcctttgatatgtggggccagggcacaatggtggctgtgtccagtgggggctcaggaggaggtggctcaggaggtggaggttcaggaggggagattgtgctgacccagtctcctggcacactgtctctgagccctggggaaagagccacactgagctgtagagccagccagtctgtgtcctctagctacctggcctggtatcagcagaagcctggacaggctcccagactgctgatctatggggcctcttctagagccacaggcatccctgacagattcagtggcagtggctctggcacagacttcaccctgaccatcagcagactggaacctgaggactttgctgtgtactattgccagcagtatggcagcagcccctggacatttggacagggcaccaaggtggaaatcaaaggtggtggtggctctgcccatcctggcagacctagagctgtgcccacacagtgtgatgtgcctccaaacagcagatttgactgtgcccctgacaaggccatcacacaagagcagtgtgaagccagaggctgctgttacatccctgccaagcaaggactgcaaggggctcagatgggacagccctggtgcttcttcccaccatcttaccccagctacaagctggaaaacctgagcagctctgagatgggctacactgctacactgaccagaaccacacctacattcttcccaaaggacatcctgacactgaggctggatgtgatgatggaaacagagaacaggctgcacttcaccatcaaggaccctgccaatagaagatatgaggtgcccctggaaacccctcatgtgcactctagagccccatctccactgtactctgtggaattttctgaggaaccctttggggtcatagtcagaaggcagctggatggcagagtgctgctgaacacaactgtggcccctctgttctttgctgatcagttcctgcagctgagcaccagcctgcctagccagtatatcacaggcctggcagagcacctgtctccactgatgctgagcacatcctggaccagaatcaccctgtggaacagagacctggctcccacacctggggccaacctgtatggctctcaccccttctatctggccctggaagatggtggttcagcccatggtgtctttctgctgaactccaatgccatggatgtggtgctgcagccctctcctgctctgtcttggagaagcactggtggcatcctggatgtgtacatctttctgggccctgagcctaagtctgtggtgcagcagtacctggatgttgtgggctaccccttcatgcctccttattggggcctgggcttccacctgtgcagatggggatacagcagcacagccatcaccagacaggttgtggaaaacatgaccagagcacacttcccactggatgtgcagtggaatgacctggactacatggacagcagaagggacttcaccttcaacaaggatggcttcagagacttccctgccatggtgcaagagctgcaccaaggtggtagaagatatatgatgattgtggacccagccatcagctcctctggaccagctggcagctacagaccctatgatgagggactgagaagaggggtgttcatcaccaatgagacaggccagcctctgattggcaaagtgtggccaggctccacagcctttccagatttcacaaaccccacagctctggcttggtgggaagatatggtggcagagttccatgatcaggtgccctttgatggcatgtggattgacatgaatgagcccagcaacttcatcaggggctctgaggatggatgccccaacaatgaactggaaaatcctccttatgtgcctggtgttgttggagggacactgcaggcagccacaatttgtgccagctctcaccagtttctgagcacccactacaacctgcacaatctgtatggcctgactgaggccattgccagccacagggctcttgtgaaggctagaggcaccagaccttttgtgatcagcaggtccacctttgctggccatggcagatatgctggccactggactggggatgtgtggtctagttgggagcagctggctagctctgtgcctgagatcctgcagttcaacctgctgggagtgccccttgttggagcagatgtgtgtggcttcctgggcaacacctcagaggaactgtgtgtcagatggactcagctgggagcattctaccctttcatgagaaaccacaacagcctgctgagcctgcctcaagagccttacagcttttctgagccagcacagcaggccatgagaaaggccctgactctgagatatgccctgctgcctcacctgtacaccctgttccatcaggctcatgtggctggggagactgtggctagacccctgttcctggaattccccaaggacagctccacctggacagtggatcatcagctgctgtggggagaagccctgctgattacacctgtgctgcaggctggcaaggctgaagtgacaggctacttccctcttggcacttggtatgacctgcagacagtgcctgtggaagctctgggatctctgcctccacctcctgctgctcctagagagcctgccattcactctgaaggccagtgggttaccctgcctgctccactggataccatcaatgtgcatctgagagcaggctacatcatccctctgcaaggccctggcctgaccaccacagaatctagacagcagccaatggcactggctgtggccctgaccaaaggtggagaagctagaggggagctgttctgggatgatggggagagcctggaagtgctggaaagaggggcctatacacaagtgatttttctggctaggaacaataccattgtgaatgagcttgtcagagtcacctctgaaggtgctggcctgcagctccagaaagtgacagtgcttggagtggccacagcaccccagcaagtgctgtctaatggggtgccagtgtccaacttcacatacagccctgataccaaggtcctggacatctgtgtgtccctgcttatgggagagcagttcctggtgtcttggtgctaataacctctactgtgccttctagttgccagccatctgttgtttgcccctcccccttgccttccttgaccctggaaggtgccactcccactgtcctttcctaataaaatgaggaaattgcatcacattgtctgagtaggtgtcattctattctggggggtggggtggggcaggacagcaagggggaggattgggaagacaatagcaggcatgctggggatgcagtgggctctatggcttctgaggtggaaagaaccagctggggctctagggggtatccccaatgtaatagtcacggacattattatcggtctgggatgtcatagtagcttaacggtagcgtgttggaacggtattcggtcacacaaccatgcgacacgtttaagttctgatacagtgcaaagggcttctcatccaattggtctacctgaagactatggtagacatctatgctgccaagttgattttggggtacagtaactgtctaaactagaagatcttttttctaaccagcggcaaaccggttcaggtaaatggtacccgatccgcttgctgctggcgtggccaccgtaaggtgttgtacttgaattggctgaatgacgaatgtgacacggcgagcatctccgattggaggggacacggtgcggcacctacggggtctgaaatttggaccacgatggactctctcgaatgcagacgctcttaatacccaaagatcacggcacgcgacgcttaacttaggttggccatgagtaacttcgcggtctggcggcgccggggttgtcatggttccgtcctgcgatactttcttcaaaagtgtcagccattcgttccacactagctcgatcccacaaccaaagatatagggagggtgattcggacaataaaagatctttattttcattagatctgtgtgttggttttttgtgtg

SEQ ID NO: 791 - DNA, 3897 bp, synthetic construct
  source 1..3897: mol_type = other DNA
  misc_feature 1..100: note = mAlb SA
  misc_feature 103..3486: note = 12450 anti-CD63 scFv:GAA
  misc_feature 3493..3768: note = bGH pA
  misc_feature 3769..3799: note = MAZ
  misc_feature 3800..3830: note = MAZ
  misc_feature 3836..3866: note = MAZ
  misc_feature 3867..3897: note = MAZ
taggtcagtgaagagaagaacaaaaagcagcatattacagttagttgtcttcatcaatctttaaatatgttgtgtggtttttctctccctgtttccacagttcaggtccagctgcaagagtctggccccaaggtggtcaagccctctgagacactgagcctgacctgcacagtgtctggtggcagcatcagcagctactactggaactggatcagacagagccctggcaaaggcctggaatggattggctacaccaagagaggctacacagactacaaccccagcctgagaagcagagtgaccatctctgaggacaccagcaagaaccagttcagcctgaggatcagctctgtgacagctgctgacacagcagtgtactactgtgcccagatgggctggggcagccatgcctttgatatgtggggccagggcacaatggtggctgtgtccagtgggggctcaggaggaggtggctcaggaggtggaggttcaggaggggagattgtgctgacccagtctcctggcacactgtctctgagccctggggaaagagccacactgagctgtagagccagccagtctgtgtcctctagctacctggcctggtatcagcagaagcctggacaggctcccagactgctgatctatggggcctcttctagagccacaggcatccctgacagattcagtggcagtggctctggcacagacttcaccctgaccatcagcagactggaacctgaggactttgctgtgtactattgccagcagtatggcagcagcccctggacatttggacagggcaccaaggtggaaatcaaaggtggtggtggctctgcccatcctggcagacctagagctgtgcccacacagtgtgatgtgcctccaaacagcagatttgactgtgcccctgacaaggccatcacacaagagcagtgtgaagccagaggctgctgttacatccctgccaagcaaggactgcaaggggctcagatgggacagccctggtgcttcttcccaccatcttaccccagctacaagctggaaaacctgagcagctctgagatgggctacactgctacactgaccagaaccacacctacattcttcccaaaggacatcctgacactgaggctggatgtgatgatggaaacagagaacaggctgcacttcaccatcaaggaccctgccaatagaagatatgaggtgcccctggaaacccctcatgtgcactctagagccccatctccactgtactctgtggaattttctgaggaaccctttggggtcatagtcagaaggcagctggatggcagagtgctgctgaacacaactgtggcccctctgttctttgctgatcagttcctgcagctgagcaccagcctgcctagccagtatatcacaggcctggcagagcacctgtctccactgatgctgagcacatcctggaccagaatcaccctgtggaacagagacctggctcccacacctggggccaacctgtatggctctcaccccttctatctggccctggaagatggtggttcagcccatggtgtctttctgctgaactccaatgccatggatgtggtgctgcagccctctcctgctctgtcttggagaagcactggtggcatcctggatgtgtacatctttctgggccctgagcctaagtctgtggtgcagcagtacctggatgttgtgggctaccccttcatgcctccttattggggcctgggcttccacctgtgcagatggggatacagcagcacagccatcaccagacaggttgtggaaaacatgaccagagcacacttcccactggatgtgcagtggaatgacctggactacatggacagcagaagggacttcaccttcaacaaggatggcttcagagacttccctgccatggtgcaagagctgcaccaaggtggtagaagatatatgatgattgtggacccagccatcagctcctctggaccagctggcagctacagaccctatgatgagggactgagaagaggggtgttcatcaccaatgagacaggccagcctctgattggcaaagtgtggccaggctccacagcctttccagatttcacaaaccccacagctctggcttggtgggaagatatggtggcagagttccatgatcaggtgccctttgatggcatgtggattgacatgaatgagcccagcaacttcatcaggggctctgaggatggatgccccaacaatgaactggaaaatcctccttatgtgcctggtgttgttggagggacactgcaggcagccacaatttgtgccagctctcaccagtttctgagcacccactacaacctgcacaatctgtatggcctgactgaggccattgccagccacagggctcttgtgaaggctagaggcaccagaccttttgtgatcagcaggtccacctttgctggccatggcagatatgctggccactggactggggatgtgtggtctagttgggagcagctggctagctctgtgcctgagatcctgcagttcaacctgctgggagtgccccttgttggagcagatgtgtgtggcttcctgggcaacacctcagaggaactgtgtgtcagatggactcagctgggagcattctaccctttcatgagaaaccacaacagcctgctgagcctgcctcaagagccttacagcttttctgagccagcacagcaggccatgagaaaggccctgactctgagatatgccctgctgcctcacctgtacaccctgttccatcaggctcatgtggctggggagactgtggctagacccctgttcctggaattccccaaggacagctccacctggacagtggatcatcagctgctgtggggagaagccctgctgattacacctgtgctgcaggctggcaaggctgaagtgacaggctacttccctcttggcacttggtatgacctgcagacagtgcctgtggaagctctgggatctctgcctccacctcctgctgctcctagagagcctgccattcactctgaaggccagtgggttaccctgcctgctccactggataccatcaatgtgcatctgagagcaggctacatcatccctctgcaaggccctggcctgaccaccacagaatctagacagcagccaatggcactggctgtggccctgaccaaaggtggagaagctagaggggagctgttctgggatgatggggagagcctggaagtgctggaaagaggggcctatacacaagtgatttttctggctaggaacaataccattgtgaatgagcttgtcagagtcacctctgaaggtgctggcctgcagctccagaaagtgacagtgcttggagtggccacagcaccccagcaagtgctgtctaatggggtgccagtgtccaacttcacatacagccctgataccaaggtcctggacatctgtgtgtccctgcttatgggagagcagttcctggtgtcttggtgctaataacctctactgtgccttctagttgccagccatctgttgtttgcccctcccccttgccttccttgaccctggaaggtgccactcccactgtcctttcctaataaaatgaggaaattgcatcacattgtctgagtaggtgtcattctattctggggggtggggtggggcaggacagcaagggggaggattgggaagacaatagcaggcatgctggggatgcagtgggctctatggcttctgaggtggaaagaaccagctggggctctagggggtatccccctggccttgggggagggggaggccagaatgactggccttgggggagggggaggccagaatgagttgactggccttgggggagggggaggccagaatgactggccttgggggagggggaggccagaatga

SEQ ID NO: 792 - DNA, 3848 bp, synthetic construct
  source 1..3848: mol_type = other DNA
  misc_feature 1..100: note = mAlb SA
  misc_feature 103..3486: note = 12450 anti-CD63 scFv:GAA
  misc_feature 3493..3719: note = SV40 polyA
  misc_feature 3720..3750: note = MAZ
  misc_feature 3751..3781: note = MAZ
  misc_feature 3787..3817: note = MAZ
  misc_feature 3818..3848: note = MAZ
taggtcagtgaagagaagaacaaaaagcagcatattacagttagttgtcttcatcaatctttaaatatgttgtgtggtttttctctccctgtttccacagttcaggtccagctgcaagagtctggccccaaggtggtcaagccctctgagacactgagcctgacctgcacagtgtctggtggcagcatcagcagctactactggaactggatcagacagagccctggcaaaggcctggaatggattggctacaccaagagaggctacacagactacaaccccagcctgagaagcagagtgaccatctctgaggacaccagcaagaaccagttcagcctgaggatcagctctgtgacagctgctgacacagcagtgtactactgtgcccagatgggctggggcagccatgcctttgatatgtggggccagggcacaatggtggctgtgtccagtgggggctcaggaggaggtggctcaggaggtggaggttcaggaggggagattgtgctgacccagtctcctggcacactgtctctgagccctggggaaagagccacactgagctgtagagccagccagtctgtgtcctctagctacctggcctggtatcagcagaagcctggacaggctcccagactgctgatctatggggcctcttctagagccacaggcatccctgacagattcagtggcagtggctctggcacagacttcaccctgaccatcagcagactggaacctgaggactttgctgtgtactattgccagcagtatggcagcagcccctggacatttggacagggcaccaaggtggaaatcaaaggtggtggtggctctgcccatcctggcagacctagagctgtgcccacacagtgtgatgtgcctccaaacagcagatttgactgtgcccctgacaaggccatcacacaagagcagtgtgaagccagaggctgctgttacatccctgccaagcaaggactgcaaggggctcagatgggacagccctggtgcttcttcccaccatcttaccccagctacaagctggaaaacctgagcagctctgagatgggctacactgctacactgaccagaaccacacctacattcttcccaaaggacatcctgacactgaggctggatgtgatgatggaaacagagaacaggctgcacttcaccatcaaggaccctgccaatagaagatatgaggtgcccctggaaacccctcatgtgcactctagagccccatctccactgtactctgtggaattttctgaggaaccctttggggtcatagtcagaaggcagctggatggcagagtgctgctgaacacaactgtggcccctctgttctttgctgatcagttcctgcagctgagcaccagcctgcctagccagtatatcacaggcctggcagagcacctgtctccactgatgctgagcacatcctggaccagaatcaccctgtggaacagagacctggctcccacacctggggccaacctgtatggctctcaccccttctatctggccctggaagatggtggttcagcccatggtgtctttctgctgaactccaatgccatggatgtggtgctgcagccctctcctgctctgtcttggagaagcactggtggcatcctggatgtgtacatctttctgggccctgagcctaagtctgtggtgcagcagtacctggatgttgtgggctaccccttcatgcctccttattggggcctgggcttccacctgtgcagatggggatacagcagcacagccatcaccagacaggttgtggaaaacatgaccagagcacacttcccactggatgtgcagtggaatgacctggactacatggacagcagaagggacttcaccttcaacaaggatggcttcagagacttccctgccatggtgcaagagctgcaccaaggtggtagaagatatatgatgattgtggacccagccatcagctcctctggaccagctggcagctacagaccctatgatgagggactgagaagaggggtgttcatcaccaatgagacaggccagcctctgattggcaaagtgtggccaggctccacagcctttccagatttcacaaaccccacagctctggcttggtgggaagatatggtggcagagttccatgatcaggtgccctttgatggcatgtggattgacatgaatgagcccagcaacttcatcaggggctctgaggatggatgccccaacaatgaactggaaaatcctccttatgtgcctggtgttgttggagggacactgcaggcagccacaatttgtgccagctctcaccagtttctgagcacccactacaacctgcacaatctgtatggcctgactgaggccattgccagccacagggctcttgtgaaggctagaggcaccagaccttttgtgatcagcaggtccacctttgctggccatggcagatatgctggccactggactggggatgtgtggtctagttgggagcagctggctagctctgtgcctgagatcctgcagttcaacctgctgggagtgccccttgttggagcagatgtgtgtggcttcctgggcaacacctcagaggaactgtgtgtcagatggactcagctgggagcattctaccctttcatgagaaaccacaacagcctgctgagcctgcctcaagagccttacagcttttctgagccagcacagcaggccatgagaaaggccctgactctgagatatgccctgctgcctcacctgtacaccctgttccatcaggctcatgtggctggggagactgtggctagacccctgttcctggaattccccaaggacagctccacctggacagtggatcatcagctgctgtggggagaagccctgctgattacacctgtgctgcaggctggcaaggctgaagtgacaggctacttccctcttggcacttggtatgacctgcagacagtgcctgtggaagctctgggatctctgcctccacctcctgctgctcctagagagcctgccattcactctgaaggccagtgggttaccctgcctgctccactggataccatcaatgtgcatctgagagcaggctacatcatccctctgcaaggccctggcctgaccaccacagaatctagacagcagccaatggcactggctgtggccctgaccaaaggtggagaagctagaggggagctgttctgggatgatggggagagcctggaagtgctggaaagaggggcctatacacaagtgatttttctggctaggaacaataccattgtgaatgagcttgtcagagtcacctctgaaggtgctggcctgcagctccagaaagtgacagtgcttggagtggccacagcaccccagcaagtgctgtctaatggggtgccagtgtccaacttcacatacagccctgataccaaggtcctggacatctgtgtgtccctgcttatgggagagcagttcctggtgtcttggtgctaataatcagccataccacatttgtagaggttttacttgctttaaaaaacctcccacacctccccctgaacctgaaacataaaatgaatgcaattgttgttgttaacttgtttattgcagcttataatggttacaaataaagcaatagcatcacaaatttcacaaataaagcatttttttcactgcattctagttgtggtttgtccaaactcatcaatgtatcttatcatgtcctggccttgggggagggggaggccagaatgactggccttgggggagggggaggccagaatgagttgactggccttgggggagggggaggccagaatgactggccttgggggagggggaggccagaatga

SEQ ID NO: 793 - DNA, 3996 bp, synthetic construct
  source 1..3996: mol_type = other DNA
  misc_feature 1..100: note = mAlb SA
  misc_feature 103..3486: note = 12450 anti-CD63 scFv:GAA
  misc_feature 3493..3768: note = bGH pA
  misc_feature 3770..3996: note = SV40 late polyA
taggtcagtgaagagaagaacaaaaagcagcatattacagttagttgtcttcatcaatctttaaatatgttgtgtggtttttctctccctgtttccacagttcaagtccagctgcaagagtctggccccaaggtggtcaagccctctgagacactgagcctgacctgcacagtgtctggtggcagcatcagcagctactactggaactggatcagacagagccctggcaaaggactggaatggattggctacaccaagagaggctacacagactacaaccccagcctgagaagcagagtgaccatctctgaggacaccagcaagaaccagttcagcctgaggatcagctctgtgacagctgctgacacagcagtttactactgtgcccagatgggctggggcagccatgcctttgatatgtggggccagggcacaatggtggctgtgtccagtgggggctcaggaggaggtggctcaggaggtggaggttcaggaggggagattgtgctgacccagtctcctggcacactgtctctgagccctggggaaagagccacactgagctgtagagccagccagtctgtgtcctctagctacctggcctggtatcagcagaagcctggacaggctcccagactgctgatctatggggcctcttctagagccacaggcatccctgacagattcagtggcagtggctctggcacagacttcaccctgaccatcagcagactggaacctgaggactttgctgtgtactattgccagcagtatggcagcagcccctggacatttggacagggcaccaaggtggaaatcaaagggggtggtggctctgcccatcctggcagacctagagctgtgcccacacagtgtgatgtgcctccaaacagcagatttgactgtgcccctgacaaggccatcacacaagagcagtgtgaagccagaggctgctgttacatccctgccaagcaaggactgcaaggggctcagatgggacagccctggtgcttcttcccaccatcttaccccagctacaagctggaaaacctgagcagctctgagatgggctacactgctacactgaccagaaccacacctacattcttcccaaaggacatcctgacactgaggctggatgtgatgatggaaacagagaacaggctgcacttcaccatcaaggaccctgccaatagaagatatgaggtgcccctggaaacccctcatgtgcactctagagccccatctccactgtactctgtggaattttctgaggaaccctttggggtcatagtcagaaggcagctggatggcagagtgctgctgaacacaactgtggcccctctgttctttgctgatcagttcctgcagctgagcaccagcctgcctagccagtatatcacaggcctggcagagcacctgtctccactgatgctgagcacatcctggaccagaatcaccctgtggaacagagacctggctcccacacctggggccaacctgtatggctctcaccccttctatctggccctggaagatggtggttcagcccatggtgtctttctgctgaactccaatgccatggatgtggtgctgcagccctctcctgctctgtcttggagaagcactggtggcatcctggatgtgtacatctttctgggccctgagcctaagtctgtggtgcagcagtacctggatgttgtgggctaccccttcatgcctccttattggggcctgggcttccacctgtgcagatggggatacagcagcacagccatcaccagacaggttgtggaaaacatgaccagagcacacttcccactggatgtgcagtggaatgacctggactacatggacagcagaagggacttcaccttcaacaaggatggcttcagagacttccctgccatggtgcaagagctgcaccaagggggcagaagatatatgatgattgtggacccagccatcagctcctctggaccagctggcagctacagaccctatgatgagggactgagaagaggggtgttcatcaccaatgagacaggccagcctctgattggcaaagtgtggccaggctccacagcctttccagatttcacaaaccccacagctctggcttggtgggaagatatggtggcagagttccatgatcaggtgccctttgatggcatgtggattgacatgaatgagcccagcaacttcatcaggggctctgaggatggatgccccaacaatgaactggaaaatcctccttatgtgcctggtgttgttggagggacactgcaggcagccacaatttgtgccagctctcaccagtttctgagcacccactacaacctgcacaatctgtatggcctgactgaggccattgccagccacagggctcttgtgaaggctagaggcaccagaccttttgtgatcagcaggtccacctttgctggccatggcagatatgctggccactggactggggatgtgtggtctagttgggagcagctggctagctctgtgcctgagatcctgcagttcaacctgctgggagtgccccttgttggagcagatgtgtgtggcttcctgggcaacacctcagaggaactgtgtgtcagatggactcagctgggagcattctaccctttcatgagaaaccacaacagcctgctgagcctgcctcaagagccttacagcttttctgagccagcacagcaggccatgagaaaggccctgactctgagatatgccctgctgcctcacctgtacaccctgttccatcaggctcatgtggctggggagactgtggctagacccctgttcctggaattccccaaggacagctccacctggacagtggatcatcagctgctgtggggagaagccctgctgattacacctgtgctgcaggctggcaaggctgaagtgacaggctacttccctcttggcacttggtatgacctgcagacagtgcctgtggaagctctgggatctctgcctccacctcctgctgctcctagagagcctgccattcactctgaaggccagtgggttaccctgcctgctccactggataccatcaatgtgcatctgagagcaggctacatcatccctctgcaaggccctggcctgaccaccacagaatctagacagcagccaatggcactggctgtggccctgaccaaagggggagaagctagaggggagctgttctgggatgatggggagagcctggaagtgctggaaagaggggcctatacacaagtgatttttctggctaggaacaataccattgtgaatgagcttgtcagagtcacctctgaaggtgctggcctgcagctccagaaagtgacagtgcttggagtggccacagcaccccagcaagtgctgtctaatggggtgccagtgtccaacttcacatacagccctgataccaaggtcctggacatctgtgtgtccctgcttatgggagagcagttcctggtgtcttggtgctaataacctctactgtgccttctagttgccagccatctgttgtttgcccctcccccttgccttccttgaccctggaaggtgccactcccactgtcctttcctaataaaatgaggaaattgcatcacattgtctgagtaggtgtcattctattctggggggtggggtggggcaggacagcaagggggaggattgggaagacaatagcaggcatgctggggatgcagtgggctctatggcttctgaggtggaaagaaccagctggggctctagggggtatccccagacatgataagatacattgatgagtttggacaaaccacaactagaatgcagtgaaaaaaatgcttgatttgtgaaatttgtgatgctattgcttgatttgtaaccattataagctgcaataaacaagttaacaacaacaattgcattcattttatgtttcaggttcagggggaggtgtgggaggttttttaaagcaagtaaaacctctacaaatgtggtatggctga

SEQ ID NO: 794 - DNA, 3768 bp, synthetic construct
  source 1..3768: mol_type = other DNA
  misc_feature 1..100: note = mAlb SA
  misc_feature 103..3486: note = 12450 anti-CD63 scFv:GAA
  misc_feature 3493..3768: note = bGH pA
taggtcagtgaagagaagaacaaaaagcagcatattacagttagttgtcttcatcaatctttaaatatgttgtgtggtttttctctccctgtttccacagttcaagtccagctgcaagagtctggccccaaggtggtcaagccctctgagacactgagcctgacctgcacagtgtctggtggcagcatcagcagctactactggaactggatcagacagagccctggcaaaggactggaatggattggctacaccaagagaggctacacagactacaaccccagcctgagaagcagagtgaccatctctgaggacaccagcaagaaccagttcagcctgaggatcagctctgtgacagctgctgacacagcagtttactactgtgcccagatgggctggggcagccatgcctttgatatgtggggccagggcacaatggtggctgtgtccagtgggggctcaggaggaggtggctcaggaggtggaggttcaggaggggagattgtgctgacccagtctcctggcacactgtctctgagccctggggaaagagccacactgagctgtagagccagccagtctgtgtcctctagctacctggcctggtatcagcagaagcctggacaggctcccagactgctgatctatggggcctcttctagagccacaggcatccctgacagattcagtggcagtggctctggcacagacttcaccctgaccatcagcagactggaacctgaggactttgctgtgtactattgccagcagtatggcagcagcccctggacatttggacagggcaccaaggtggaaatcaaagggggtggtggctctgcccatcctggcagacctagagctgtgcccacacagtgtgatgtgcctccaaacagcagatttgactgtgcccctgacaaggccatcacacaagagcagtgtgaagccagaggctgctgttacatccctgccaagcaaggactgcaaggggctcagatgggacagccctggtgcttcttcccaccatcttaccccagctacaagctggaaaacctgagcagctctgagatgggctacactgctacactgaccagaaccacacctacattcttcccaaaggacatcctgacactgaggctggatgtgatgatggaaacagagaacaggctgcacttcaccatcaaggaccctgccaatagaagatatgaggtgcccctggaaacccctcatgtgcactctagagccccatctccactgtactctgtggaattttctgaggaaccctttggggtcatagtcagaaggcagctggatggcagagtgctgctgaacacaactgtggcccctctgttctttgctgatcagttcctgcagctgagcaccagcctgcctagccagtatatcacaggcctggcagagcacctgtctccactgatgctgagcacatcctggaccagaatcaccctgtggaacagagacctggctcccacacctggggccaacctgtatggctctcaccccttctatctggccctggaagatggtggttcagcccatggtgtctttctgctgaactccaatgccatggatgtggtgctgcagccctctcctgctctgtcttggagaagcactggtggcatcctggatgtgtacatctttctgggccctgagcctaagtctgtggtgcagcagtacctggatgttgtgggctaccccttcatgcctccttattggggcctgggcttccacctgtgcagatggggatacagcagcacagccatcaccagacaggttgtggaaaacatgaccagagcacacttcccactggatgtgcagtggaatgacctggactacatggacagcagaagggacttcaccttcaacaaggatggcttcagagacttccctgccatggtgcaagagctgcaccaagggggcagaagatatatgatgattgtggacccagccatcagctcctctggaccagctggcagctacagaccctatgatgagggactgagaagaggggtgttcatcaccaatgagacaggccagcctctgattggcaaagtgtggccaggctccacagcctttccagatttcacaaaccccacagctctggcttggtgggaagatatggtggcagagttccatgatcaggtgccctttgatggcatgtggattgacatgaatgagcccagcaacttcatcaggggctctgaggatggatgccccaacaatgaactggaaaatcctccttatgtgcctggtgttgttggagggacactgcaggcagccacaatttgtgccagctctcaccagtttctgagcacccactacaacctgcacaatctgtatggcctgactgaggccattgccagccacagggctcttgtgaaggctagaggcaccagaccttttgtgatcagcaggtccacctttgctggccatggcagatatgctggccactggactggggatgtgtggtctagttgggagcagctggctagctctgtgcctgagatcctgcagttcaacctgctgggagtgccccttgttggagcagatgtgtgtggcttcctgggcaacacctcagaggaactgtgtgtcagatggactcagctgggagcattctaccctttcatgagaaaccacaacagcctgctgagcctgcctcaagagccttacagcttttctgagccagcacagcaggccatgagaaaggccctgactctgagatatgccctgctgcctcacctgtacaccctgttccatcaggctcatgtggctggggagactgtggctagacccctgttcctggaattccccaaggacagctccacctggacagtggatcatcagctgctgtggggagaagccctgctgattacacctgtgctgcaggctggcaaggctgaagtgacaggctacttccctcttggcacttggtatgacctgcagacagtgcctgtggaagctctgggatctctgcctccacctcctgctgctcctagagagcctgccattcactctgaaggccagtgggttaccctgcctgctccactggataccatcaatgtgcatctgagagcaggctacatcatccctctgcaaggccctggcctgaccaccacagaatctagacagcagccaatggcactggctgtggccctgaccaaagggggagaagctagaggggagctgttctgggatgatggggagagcctggaagtgctggaaagaggggcctatacacaagtgatttttctggctaggaacaataccattgtgaatgagcttgtcagagtcacctctgaaggtgctggcctgcagctccagaaagtgacagtgcttggagtggccacagcaccccagcaagtgctgtctaatggggtgccagtgtccaacttcacatacagccctgataccaaggtcctggacatctgtgtgtccctgcttatgggagagcagttcctggtgtcttggtgctaataacctctactgtgccttctagttgccagccatctgttgtttgcccctcccccttgccttccttgaccctggaaggtgccactcccactgtcctttcctaataaaatgaggaaattgcatcacattgtctgagtaggtgtcattctattctggggggtggggtggggcaggacagcaagggggaggattgggaagacaatagcaggcatgctggggatgcagtgggctctatggcttctgaggtggaaagaaccagctggggctctagggggtatcccc

SEQ ID NO: 795 - DNA, 504 bp, synthetic construct
  source 1..504: mol_type = other DNA
cctctactgtgccttctagttgccagccatctgttgtttgcccctcccccttgccttccttgaccctggaaggtgccactcccactgtcctttcctaataaaatgaggaaattgcatcacattgtctgagtaggtgtcattctattctggggggtggggtggggcaggacagcaagggggaggattgggaagacaatagcaggcatgctggggatgcagtgggctctatggcttctgaggtggaaagaaccagctggggctctagggggtatccccagacatgataagatacattgatgagtttggacaaaccacaactagaatgcagtgaaaaaaatgcttgatttgtgaaatttgtgatgctattgcttgatttgtaaccattataagctgcaataaacaagttaacaacaacaattgcattcattttatgtttcaggttcagggggaggtgtgggaggttttttaaagcaagtaaaacctctacaaatgtggtatggctga

SEQ ID NO: 796 - protein, 4 aa, synthetic construct
LLNE

SEQ ID NO: 797 - protein, 8 aa, synthetic construct
DSTDFTGT

SEQ ID NO: 798 - protein, 9 aa, synthetic construct
VKHPVTGQF

SEQ ID NO: 799 - protein, 7 aa, synthetic construct
IERIPEL

SEQ ID NO: 800 - protein, 18 aa, synthetic construct
LNENSYVPREAGSQKDEN

SEQ ID NO: 801 - protein, 8 aa, synthetic construct
IVDKNGRL

SEQ ID NO: 802 - protein, 10 aa, synthetic construct
IVDKNGRLVY

SEQ ID NO: 803 - protein, 5 aa, synthetic construct
DQTKF

SEQ ID NO: 804 - protein, 8 aa, synthetic construct
LVENPGGY

SEQ ID NO: 805 - protein, 9 aa, synthetic construct
PIVNAELSF

SEQ ID NO: 806 - protein, 9 aa, synthetic construct
PYLGTTMDT

SEQ ID NO: 807 - protein, 220 aa, synthetic construct
PCPAPELLGGPSVFLFPPKPKDTLMISRTPEVTCVVVDVSHEDPEVKFNWYVDGVEVHNAKTKPREEQYNSTYRVVSVLTVLHQDWLNGKEYKCKVSNKALPAPIEKTISKAKGQPREPQVYTLPPSRDELTKNQVSLTCLVKGFYPSDIAVEWESNGQPENNYKTTPPVLDSDGSFFLYSKLTVDKSRWQQGNVFSCSVMHEALHNHYTQKSLSLSPGK

SEQ ID NO: 808 - protein, 451 aa, synthetic construct
EVQLVESGGGLVQPGGSLRLSCAASGFAFSSYAMTWVRQAPGKGLEWVSVISGTGGSTYYADSVKGRFTISRDNSKNTLYLQMNSLRAEDTAVYYCAKGGAARRMEYFQYWGQGTLVTVSSASTKGPSVFPLAPSSKSTSGGTAALGCLVKDYFPEPVTVSWNSGALTSGVHTFPAVLQSSGLYSLSSVVTVPSSSLGTQTYICNVNHKPSNTKVDKKVEPKSCDKTHTCPPCPAPELLGGPSVFLFPPKPKDTLMISRTPEVTCVVVDVSHEDPEVKFNWYVDGVEVHNAKTKPREEQYNSTYRVVSVLTVLHQDWLNGKEYKCKVSNKALPAPIEKTISKAKGQPREPQVYTLPPSRDELTKNQVSLTCLVKGFYPSDIAVEWESNGQPENNYKTTPPVLDSDGSFFLYSKLTVDKSRWQQGNVFSCSVMHEALHNHYTQKSLSLSPGK

SEQ ID NO: 809 - protein, 451 aa, synthetic construct
EVQLVESGGGLVQPGGSLRLSCAASGFTFNSYAMTWVRQAPGKGLEWVSFIGGSTGNTYYAGSVKGRFTISSDNSKKTLYLQMNSLRAEDTAVYYCAKGGAARRMEYFQHWGQGTLVTVSSASTKGPSVFPLAPSSKSTSGGTAALGCLVKDYFPEPVTVSWNSGALTSGVHTFPAVLQSSGLYSLSSVVTVPSSSLGTQTYICNVNHKPSNTKVDKKVEPKSCDKTHTCPPCPAPELLGGPSVFLFPPKPKDTLMISRTPEVTCVVVDVSHEDPEVKFNWYVDGVEVHNAKTKPREEQYNSTYRVVSVLTVLHQDWLNGKEYKCKVSNKALPAPIEKTISKAKGQPREPQVYTLPPSRDELTKNQVSLTCLVKGFYPSDIAVEWESNGQPENNYKTTPPVLDSDGSFFLYSKLTVDKSRWQQGNVFSCSVMHEALHNHYTQKSLSLSPGK

SEQ ID NO: 810 - protein, 452 aa, synthetic construct
QVQLVESGGGVVQPGRSLRLSCAASGFTFTTYGMHWVRQAPGKGLEWVAVIWYDGSNKYYGDSVKGRFTISRDNSKNTLYLQMNSLRVDDTAVYYCTRTHGYTRSSDGFDYWGQGTLVTVSSASTKGPSVFPLAPSSKSTSGGTAALGCLVKDYFPEPVTVSWNSGALTSGVHTFPAVLQSSGLYSLSSVVTVPSSSLGTQTYICNVNHKPSNTKVDKKVEPKSCDKTHTCPPCPAPELLGGPSVFLFPPKPKDTLMISRTPEVTCVVVDVSHEDPEVKFNWYVDGVEVHNAKTKPREEQYNSTYRVVSVLTVLHQDWLNGKEYKCKVSNKALPAPIEKTISKAKGQPREPQVYTLPPSRDELTKNQVSLTCLVKGFYPSDIAVEWESNGQPENNYKTTPPVLDSDGSFFLYSKLTVDKSRWQQGNVFSCSVMHEALHNHYTQKSLSLSPGK

SEQ ID NO: 811 - protein, 453 aa, synthetic construct
EVQLVESGGGLVQPGRSLRLSCAASGFTFDDKAMHWVRQVPGKGLEWISGISWNSGTIGYADSVKGRFIISRDNAKNSLYLQMNSLRAEDTALYYCAKDGDTSGWYWYGLDVWGQGTTVTVSSASTKGPSVFPLAPSSKSTSGGTAALGCLVKDYFPEPVTVSWNSGALTSGVHTFPAVLQSSGLYSLSSVVTVPSSSLGTQTYICNVNHKPSNTKVDKKVEPKSCDKTHTCPPCPAPELLGGPSVFLFPPKPKDTLMISRTPEVTCVVVDVSHEDPEVKFNWYVDGVEVHNAKTKPREEQYNSTYRVVSVLTVLHQDWLNGKEYKCKVSNKALPAPIEKTISKAKGQPREPQVYTLPPSRDELTKNQVSLTCLVKGFYPSDIAVEWESNGQPENNYKTTPPVLDSDGSFFLYSKLTVDKSRWQQGNVFSCSVMHEALHNHYTQKSLSLSPGK

SEQ ID NO: 812 - protein, 450 aa, synthetic construct
QVQLVESGGGVVQPGRSLRLSCIASGFTFSVYGIHWVRQAPGKGLEWMAVISHDGNIKHYADSVKGRFTISRDNSKNTLYLQINSLRTEDTAVYYCAKDTWNSLDTFDIWGQGTMVTVSSASTKGPSVFPLAPSSKSTSGGTAALGCLVKDYFPEPVTVSWNSGALTSGVHTFPAVLQSSGLYSLSSVVTVPSSSLGTQTYICNVNHKPSNTKVDKKVEPKSCDKTHTCPPCPAPELLGGPSVFLFPPKPKDTLMISRTPEVTCVVVDVSHEDPEVKFNWYVDGVEVHNAKTKPREEQYNSTYRVVSVLTVLHQDWLNGKEYKCKVSNKALPAPIEKTISKAKGQPREPQVYTLPPSRDELTKNQVSLTCLVKGFYPSDIAVEWESNGQPENNYKTTPPVLDSDGSFFLYSKLTVDKSRWQQGNVFSCSVMHEALHNHYTQKSLSLSPGK

SEQ ID NO: 813 - protein, 450 aa, synthetic construct
QVTLRESGPALVKPSQTLTLTCTFSGFSLNTYGMFVSWIRQPPGKALEWLAHIHWDDDKYYSTSLKTRLTISKDTSKNQVVLTMTNMDPVDTATYYCARGHNNLNYIIHWGQGTLVTVSSASTKGPSVFPLAPSSKSTSGGTAALGCLVKDYFPEPVTVSWNSGALTSGVHTFPAVLQSSGLYSLSSVVTVPSSSLGTQTYICNVNHKPSNTKVDKKVEPKSCDKTHTCPPCPAPELLGGPSVFLFPPKPKDTLMISRTPEVTCVVVDVSHEDPEVKFNWYVDGVEVHNAKTKPREEQYNSTYRVVSVLTVLHQDWLNGKEYKCKVSNKALPAPIEKTISKAKGQPREPQVYTLPPSRDELTKNQVSLTCLVKGFYPSDIAVEWESNGQPENNYKTTPPVLDSDGSFFLYSKLTVDKSRWQQGNVFSCSVMHEALHNHYTQKSLSLSPGK

SEQ ID NO: 814 - protein, 446 aa, synthetic construct
EVQLVESGGGLVQPGGSLRLSCAVSGFIFSSYEMNWVRQAPGKGLEWVSYISSSGSTIFYADSVKGRFTISRDNAKNSLYLQMNSLRAEDTAVYYCVSGVVLFDVWGQGTMVTVSSASTKGPSVFPLAPSSKSTSGGTAALGCLVKDYFPEPVTVSWNSGALTSGVHTFPAVLQSSGLYSLSSVVTVPSSSLGTQTYICNVNHKPSNTKVDKKVEPKSCDKTHTCPPCPAPELLGGPSVFLFPPKPKDTLMISRTPEVTCVVVDVSHEDPEVKFNWYVDGVEVHNAKTKPREEQYNSTYRVVSVLTVLHQDWLNGKEYKCKVSNKALPAPIEKTISKAKGQPREPQVYTLPPSRDELTKNQVSLTCLVKGFYPSDIAVEWESNGQPENNYKTTPPVLDSDGSFFLYSKLTVDKSRWQQGNVFSCSVMHEALHNHYTQKSLSLSPGK

SEQ ID NO: 815 - protein, 455 aa, synthetic construct
EVQLVESGGGLVQPGGSLRLSCAASGFTFSNYWMTWVRQAPGKGLEWVANIKEDGSEKDYVDSVKGRFTISRDNAKNSLYLQMNSLRGEDTAVYYCARDGEQLVDYYYYYVMDVWGQGTTVTVSSASTKGPSVFPLAPSSKSTSGGTAALGCLVKDYFPEPVTVSWNSGALTSGVHTFPAVLQSSGLYSLSSVVTVPSSSLGTQTYICNVNHKPSNTKVDKKVEPKSCDKTHTCPPCPAPELLGGPSVFLFPPKPKDTLMISRTPEVTCVVVDVSHEDPEVKFNWYVDGVEVHNAKTKPREEQYNSTYRVVSVLTVLHQDWLNGKEYKCKVSNKALPAPIEKTISKAKGQPREPQVYTLPPSRDELTKNQVSLTCLVKGFYPSDIAVEWESNGQPENNYKTTPPVLDSDGSFFLYSKLTVDKSRWQQGNVFSCSVMHEALHNHYTQKSLSLSPGK

SEQ ID NO: 816 - protein, 457 aa, synthetic construct
EVQLVESGGGLVQPGRSLRLSCAASGFTFDDYAMHWVRQAPGKGLEWVSGISWNSGYIGYADSVKGRFTISRDNAENSLHLQMNSLRAEDTALYYCARGGSTLVRGVKGGYYGMDVWGQGTTVTVSSASTKGPSVFPLAPSSKSTSGGTAALGCLVKDYFPEPVTVSWNSGALTSGVHTFPAVLQSSGLYSLSSVVTVPSSSLGTQTYICNVNHKPSNTKVDKKVEPKSCDKTHTCPPCPAPELLGGPSVFLFPPKPKDTLMISRTPEVTCVVVDVSHEDPEVKFNWYVDGVEVHNAKTKPREEQYNSTYRVVSVLTVLHQDWLNGKEYKCKVSNKALPAPIEKTISKAKGQPREPQVYTLPPSRDELTKNQVSLTCLVKGFYPSDIAVEWESNGQPENNYKTTPPVLDSDGSFFLYSKLTVDKSRWQQGNVFSCSVMHEALHNHYTQKSLSLSPGK

SEQ ID NO: 817 - protein, 447 aa, synthetic construct
QVQLVESGGGVVQPGRSLRLSCAASGFTFSSYGMHWVRQAPGKGLEWVAVIWYDGSNKYYADSVKGRFTISRDISKNTLYLQMNSLRAEDTAVYYCAGQLDLFFDYWGQGTLVTVSSASTKGPSVFPLAPSSKSTSGGTAALGCLVKDYFPEPVTVSWNSGALTSGVHTFPAVLQSSGLYSLSSVVTVPSSSLGTQTYICNVNHKPSNTKVDKKVEPKSCDKTHTCPPCPAPELLGGPSVFLFPPKPKDTLMISRTPEVTCVVVDVSHEDPEVKFNWYVDGVEVHNAKTKPREEQYNSTYRVVSVLTVLHQDWLNGKEYKCKVSNKALPAPIEKTISKAKGQPREPQVYTLPPSRDELTKNQVSLTCLVKGFYPSDIAVEWESNGQPENNYKTTPPVLDSDGSFFLYSKLTVDKSRWQQGNVFSCSVMHEALHNHYTQKSLSLSPGK

SEQ ID NO: 818 - protein, 455 aa, synthetic construct
EVQLVESGGGLVQPGGSLRLSCTASGFTFSNYWMTWVRQAPGKGLEWVANIKEDGSEKEYVDSVKGRFTISRDNAKNSLYLQMNSLRGEDTAVYYCARDGEQLVDYYYYYVMDVWGQGTTVTVSSASTKGPSVFPLAPSSKSTSGGTAALGCLVKDYFPEPVTVSWNSGALTSGVHTFPAVLQSSGLYSLSSVVTVPSSSLGTQTYICNVNHKPSNTKVDKKVEPKSCDKTHTCPPCPAPELLGGPSVFLFPPKPKDTLMISRTPEVTCVVVDVSHEDPEVKFNWYVDGVEVHNAKTKPREEQYNSTYRVVSVLTVLHQDWLNGKEYKCKVSNKALPAPIEKTISKAKGQPREPQVYTLPPSRDELTKNQVSLTCLVKGFYPSDIAVEWESNGQPENNYKTTPPVLDSDGSFFLYSKLTVDKSRWQQGNVFSCSVMHEALHNHYTQKSLSLSPGK

SEQ ID NO: 819 - protein, 451 aa, synthetic construct
EVQLVESGGGLVQPGGSLRLSCATSGFTFTSYDMKWVRQAPGLGLEWVSAISGSGGNTYYADSVKGRFTISRDNSRNTLYLQMNSLRAEDTAVYYCTRSHDFGAFDYFDYWGQGTLVTVSSASTKGPSVFPLAPSSKSTSGGTAALGCLVKDYFPEPVTVSWNSGALTSGVHTFPAVLQSSGLYSLSSVVTVPSSSLGTQTYICNVNHKPSNTKVDKKVEPKSCDKTHTCPPCPAPELLGGPSVFLFPPKPKDTLMISRTPEVTCVVVDVSHEDPEVKFNWYVDGVEVHNAKTKPREEQYNSTYRVVSVLTVLHQDWLNGKEYKCKVSNKALPAPIEKTISKAKGQPREPQVYTLPPSRDELTKNQVSLTCLVKGFYPSDIAVEWESNGQPENNYKTTPPVLDSDGSFFLYSKLTVDKSRWQQGNVFSCSVMHEALHNHYTQKSLSLSPGK

SEQ ID NO: 820 - protein, 452 aa, synthetic construct
EVQLVESGGDLVQPGRSLRLSCAASGFTFDDYAMHWVRQAPGKGLEWVSGISWNSATRVYADSVKGRFTISRDNAKNFLYLQMNSLRSEDTALYHCAKDMDISLGYYGLDVWGQGTTVTVSSASTKGPSVFPLAPSSKSTSGGTAALGCLVKDYFPEPVTVSWNSGALTSGVHTFPAVLQSSGLYSLSSVVTVPSSSLGTQTYICNVNHKPSNTKVDKKVEPKSCDKTHTCPPCPAPELLGGPSVFLFPPKPKDTLMISRTPEVTCVVVDVSHEDPEVKFNWYVDGVEVHNAKTKPREEQYNSTYRVVSVLTVLHQDWLNGKEYKCKVSNKALPAPIEKTISKAKGQPREPQVYTLPPSRDELTKNQVSLTCLVKGFYPSDIAVEWESNGQPENNYKTTPPVLDSDGSFFLYSKLTVDKSRWQQGNVFSCSVMHEALHNHYTQKSLSLSPGK

SEQ ID NO: 821 - protein, 454 aa, synthetic construct
QITLKESGPTLVKPTQTLTLTCTFSGFSLSTSGVGVVWIRQPPGKALEWLALIYWNDHKRYSPSLGSRLTITKDTSKNQVVLTMTNMDPVDTATYYCAHYSGSYSYYYYGLDVWGQGTTVTVSSASTKGPSVFPLAPSSKSTSGGTAALGCLVKDYFPEPVTVSWNSGALTSGVHTFPAVLQSSGLYSLSSVVTVPSSSLGTQTYICNVNHKPSNTKVDKKVEPKSCDKTHTCPPCPAPELLGGPSVFLFPPKPKDTLMISRTPEVTCVVVDVSHEDPEVKFNWYVDGVEVHNAKTKPREEQYNSTYRVVSVLTVLHQDWLNGKEYKCKVSNKALPAPIEKTISKAKGQPREPQVYTLPPSRDELTKNQVSLTCLVKGFYPSDIAVEWESNGQPENNYKTTPPVLDSDGSFFLYSKLTVDKSRWQQGNVFSCSVMHEALHNHYTQKSLSLSPGK

SEQ ID NO: 822 - protein, 451 aa, synthetic construct
EVQLLESGGALVQPGGSLRLSCAASGFTFTSYAMHWVRQAPGKGLEWVSSIRGSGGGTYSADSVKGRFTISRDNSRDTLYLQMNSVRAEDTAVYYCARSHDYGAFDFFDYWGQGTLVTVSSASTKGPSVFPLAPSSKSTSGGTAALGCLVKDYFPEPVTVSWNSGALTSGVHTFPAVLQSSGLYSLSSVVTVPSSSLGTQTYICNVNHKPSNTKVDKKVEPKSCDKTHTCPPCPAPELLGGPSVFLFPPKPKDTLMISRTPEVTCVVVDVSHEDPEVKFNWYVDGVEVHNAKTKPREEQYNSTYRVVSVLTVLHQDWLNGKEYKCKVSNKALPAPIEKTISKAKGQPREPQVYTLPPSRDELTKNQVSLTCLVKGFYPSDIAVEWESNGQPENNYKTTPPVLDSDGSFFLYSKLTVDKSRWQQGNVFSCSVMHEALHNHYTQKSLSLSPGK

SEQ ID NO: 823 - protein, 446 aa, synthetic construct
QVQLVESGGGLVKPGGSLRLSCAASGFTFSDYFMSWIRQAPGKGLEWVSYISSTGSTINYADSVKGRFTISRDNVKNSLYLQMTSLRVEDTAVYYCTRDNWNYEYWGQGTLVTVSSASTKGPSVFPLAPSSKSTSGGTAALGCLVKDYFPEPVTVSWNSGALTSGVHTFPAVLQSSGLYSLSSVVTVPSSSLGTQTYICNVNHKPSNTKVDKKVEPKSCDKTHTCPPCPAPELLGGPSVFLFPPKPKDTLMISRTPEVTCVVVDVSHEDPEVKFNWYVDGVEVHNAKTKPREEQYNSTYRVVSVLTVLHQDWLNGKEYKCKVSNKALPAPIEKTISKAKGQPREPQVYTLPPSRDELTKNQVSLTCLVKGFYPSDIAVEWESNGQPENNYKTTPPVLDSDGSFFLYSKLTVDKSRWQQGNVFSCSVMHEALHNHYTQKSLSLSPGK

SEQ ID NO: 824 - protein, 453 aa, synthetic construct
QLQLQESGPGLVKPSETLSLTCTVSGESISSNTYYWGWIRQPPGKGLEWIGSIDYSGTTNYNPSLKSRVTISVDTSRNHFSLRLRSVTAADTAVYYCAREWGNYGYYYGMDVWGQGTTVTVSSASTKGPSVFPLAPSSKSTSGGTAALGCLVKDYFPEPVTVSWNSGALTSGVHTFPAVLQSSGLYSLSSVVTVPSSSLGTQTYICNVNHKPSNTKVDKKVEPKSCDKTHTCPPCPAPELLGGPSVFLFPPKPKDTLMISRTPEVTCVVVDVSHEDPEVKFNWYVDGVEVHNAKTKPREEQYNSTYRVVSVLTVLHQDWLNGKEYKCKVSNKALPAPIEKTISKAKGQPREPQVYTLPPSRDELTKNQVSLTCLVKGFYPSDIAVEWESNGQPENNYKTTPPVLDSDGSFFLYSKLTVDKSRWQQGNVFSCSVMHEALHNHYTQKSLSLSPGK

SEQ ID NO: 825 - protein, 448 aa, synthetic construct
QVQLVQSGAEVKKPGSSVRVSCKASRGTFSSYAISWVRQAPGQGLEWMGGIIPIFGTANYAQKFLARVTITADESTSTAYMELSSLRSEDTAVYYCAREKGWNYFDYWGQGTLVTVSSASTKGPSVFPLAPSSKSTSGGTAALGCLVKDYFPEPVTVSWNSGALTSGVHTFPAVLQSSGLYSLSSVVTVPSSSLGTQTYICNVNHKPSNTKVDKKVEPKSCDKTHTCPPCPAPELLGGPSVFLFPPKPKDTLMISRTPEVTCVVVDVSHEDPEVKFNWYVDGVEVHNAKTKPREEQYNSTYRVVSVLTVLHQDWLNGKEYKCKVSNKALPAPIEKTISKAKGQPREPQVYTLPPSRDELTKNQVSLTCLVKGFYPSDIAVEWESNGQPENNYKTTPPVLDSDGSFFLYSKLTVDKSRWQQGNVFSCSVMHEALHNHYTQKSLSLSPGK

SEQ ID NO: 826 - protein, 453 aa, synthetic construct
QVQLVESGGGLVKPGGSLRLSCAASGFTFSDYYMNWIRQAPGKGLEWVSYISSSGTTIYYADSVKGRFTISRDNAKKSLYLEMNSLRAEDTAVYYCAREGYGNDYYYYGIDVWGQGTTVTVSSASTKGPSVFPLAPSSKSTSGGTAALGCLVKDYFPEPVTVSWNSGALTSGVHTFPAVLQSSGLYSLSSVVTVPSSSLGTQTYICNVNHKPSNTKVDKKVEPKSCDKTHTCPPCPAPELLGGPSVFLFPPKPKDTLMISRTPEVTCVVVDVSHEDPEVKFNWYVDGVEVHNAKTKPREEQYNSTYRVVSVLTVLHQDWLNGKEYKCKVSNKALPAPIEKTISKAKGQPREPQVYTLPPSRDELTKNQVSLTCLVKGFYPSDIAVEWESNGQPENNYKTTPPVLDSDGSFFLYSKLTVDKSRWQQGNVFSCSVMHEALHNHYTQKSLSLSPGK

SEQ ID NO: 827 - protein, 452 aa, synthetic construct
QVQLVESGGGVVQPGRSLRLSCAASGFTFSSFGMHWVRQAPGKGLEWVIFISYDGSDKYYADSVKGRFAISRDSSKNTLYLQMNSLRAEDTAVYYCAKENGILTDSYGMDVWGQGTTVTVSSASTKGPSVFPLAPSSKSTSGGTAALGCLVKDYFPEPVTVSWNSGALTSGVHTFPAVLQSSGLYSLSSVVTVPSSSLGTQTYICNVNHKPSNTKVDKKVEPKSCDKTHTCPPCPAPELLGGPSVFLFPPKPKDTLMISRTPEVTCVVVDVSHEDPEVKFNWYVDGVEVHNAKTKPREEQYNSTYRVVSVLTVLHQDWLNGKEYKCKVSNKALPAPIEKTISKAKGQPREPQVYTLPPSRDELTKNQVSLTCLVKGFYPSDIAVEWESNGQPENNYKTTPPVLDSDGSFFLYSKLTVDKSRWQQGNVFSCSVMHEALHNHYTQKSLSLSPGK

SEQ ID NO: 828 - protein, 454 aa, synthetic construct
QVQLVQSGAEVKKPGASVKVSCKASGYTFTSYGISWVRQAPGQGLEWMGWISVYHGNTNYAQKFQGRVTMTTDTSTSTAYMELRSLRSDDTAVYYCAREGYYDFWSGYYPFDYWGQGTLVTVSSASTKGPSVFPLAPSSKSTSGGTAALGCLVKDYFPEPVTVSWNSGALTSGVHTFPAVLQSSGLYSLSSVVTVPSSSLGTQTYICNVNHKPSNTKVDKKVEPKSCDKTHTCPPCPAPELLGGPSVFLFPPKPKDTLMISRTPEVTCVVVDVSHEDPEVKFNWYVDGVEVHNAKTKPREEQYNSTYRVVSVLTVLHQDWLNGKEYKCKVSNKALPAPIEKTISKAKGQPREPQVYTLPPSRDELTKNQVSLTCLVKGFYPSDIAVEWESNGQPENNYKTTPPVLDSDGSFFLYSKLTVDKSRWQQGNVFSCSVMHEALHNHYTQKSLSLSPGK

SEQ ID NO: 829 - protein, 448 aa, synthetic construct
EVQLVESGGGLIQPGGSLRLSCEASGFTFRNYEMNWVRQAPGKGLEWVSYISSSGNMKDYAESVKGRFTISRDNVKNSLQLQMNSLRVEDTAVYYCARDEFPYGMDVWGQGTTVTVSSASTKGPSVFPLAPSSKSTSGGTAALGCLVKDYFPEPVTVSWNSGALTSGVHTFPAVLQSSGLYSLSSVVTVPSSSLGTQTYICNVNHKPSNTKVDKKVEPKSCDKTHTCPPCPAPELLGGPSVFLFPPKPKDTLMISRTPEVTCVVVDVSHEDPEVKFNWYVDGVEVHNAKTKPREEQYNSTYRVVSVLTVLHQDWLNGKEYKCKVSNKALPAPIEKTISKAKGQPREPQVYTLPPSRDELTKNQVSLTCLVKGFYPSDIAVEWESNGQPENNYKTTPPVLDSDGSFFLYSKLTVDKSRWQQGNVFSCSVMHEALHNHYTQKSLSLSPGK

SEQ ID NO: 830 - protein, 451 aa, synthetic construct
EVQLVESGGGLVQPGRSLRLSCAASGFTFDDYAMNWVRQAPGKGLEWVSGISWSSGSMDYADSVKGRFTISRDNAKNSLYLQMNSLRTEDTALYYCAKAREVGDYYGMDVWGQGTTVTVSSASTKGPSVFPLAPSSKSTSGGTAALGCLVKDYFPEPVTVSWNSGALTSGVHTFPAVLQSSGLYSLSSVVTVPSSSLGTQTYICNVNHKPSNTKVDKKVEPKSCDKTHTCPPCPAPELLGGPSVFLFPPKPKDTLMISRTPEVTCVVVDVSHEDPEVKFNWYVDGVEVHNAKTKPREEQYNSTYRVVSVLTVLHQDWLNGKEYKCKVSNKALPAPIEKTISKAKGQPREPQVYTLPPSRDELTKNQVSLTCLVKGFYPSDIAVEWESNGQPENNYKTTPPVLDSDGSFFLYSKLTVDKSRWQQGNVFSCSVMHEALHNHYTQKSLSLSPGK

SEQ ID NO: 831 - protein, 449 aa, synthetic construct
EVQLVESGGGLVQPGRSLTLSCAASGFTFDNFGMHWVRQGPGKGLEWVSGLTWNSGVIGYADSVKGRFTISRDNAKNSLYLQMNSLRPEDTALYYCAKDIRNYGPFDYWGQGTLVTVSSASTKGPSVFPLAPSSKSTSGGTAALGCLVKDYFPEPVTVSWNSGALTSGVHTFPAVLQSSGLYSLSSVVTVPSSSLGTQTYICNVNHKPSNTKVDKKVEPKSCDKTHTCPPCPAPELLGGPSVFLFPPKPKDTLMISRTPEVTCVVVDVSHEDPEVKFNWYVDGVEVHNAKTKPREEQYNSTYRVVSVLTVLHQDWLNGKEYKCKVSNKALPAPIEKTISKAKGQPREPQVYTLPPSRDELTKNQVSLTCLVKGFYPSDIAVEWESNGQPENNYKTTPPVLDSDGSFFLYSKLTVDKSRWQQGNVFSCSVMHEALHNHYTQKSLSLSPGK

SEQ ID NO: 832 - protein, 449 aa, synthetic construct
EVQLVESGGGLVQPGGSLRLSCAASGFTFNIFEMNWVRQAPGKGLEWISYISSRGTTTYYADSVRGRFTISRDNAKNSLYLQMNSLRAEDTAVYYCARDYEATIPFDFWGQGTLVTVSSASTKGPSVFPLAPSSKSTSGGTAALGCLVKDYFPEPVTVSWNSGALTSGVHTFPAVLQSSGLYSLSSVVTVPSSSLGTQTYICNVNHKPSNTKVDKKVEPKSCDKTHTCPPCPAPELLGGPSVFLFPPKPKDTLMISRTPEVTCVVVDVSHEDPEVKFNWYVDGVEVHNAKTKPREEQYNSTYRVVSVLTVLHQDWLNGKEYKCKVSNKALPAPIEKTISKAKGQPREPQVYTLPPSRDELTKNQVSLTCLVKGFYPSDIAVEWESNGQPENNYKTTPPVLDSDGSFFLYSKLTVDKSRWQQGNVFSCSVMHEALHNHYTQKSLSLSPGK

SEQ ID NO: 833 - protein, 451 aa, synthetic construct
EVQLVESGGSVVRPGGSLRLSCEASGFTFDDYGMSWVRQDPGKGLEWVSGINWNGDRTNYADSVKGRFIISRDNAKNSVYLQMNSLRAEDSALYHCARDQGLGVAATLDYWGQGTLVTVSSASTKGPSVFPLAPSSKSTSGGTAALGCLVKDYFPEPVTVSWNSGALTSGVHTFPAVLQSSGLYSLSSVVTVPSSSLGTQTYICNVNHKPSNTKVDKKVEPKSCDKTHTCPPCPAPELLGGPSVFLFPPKPKDTLMISRTPEVTCVVVDVSHEDPEVKFNWYVDGVEVHNAKTKPREEQYNSTYRVVSVLTVLHQDWLNGKEYKCKVSNKALPAPIEKTISKAKGQPREPQVYTLPPSRDELTKNQVSLTCLVKGFYPSDIAVEWESNGQPENNYKTTPPVLDSDGSFFLYSKLTVDKSRWQQGNVFSCSVMHEALHNHYTQKSLSLSPGK

SEQ ID NO: 834 - protein, 458 aa, synthetic construct
EVQLVESGGGLVQPGGSLRLSCAASGFTVSNYEMNWVRQAPGKGLEWVSYISSSTSNIYYADSVKGRFTISRDNAENSLYLQMNSLRVEDTAVYYCVRDGIVVVPVGRGYYYYGLDVWGQGTTVTVSSASTKGPSVFPLAPSSKSTSGGTAALGCLVKDYFPEPVTVSWNSGALTSGVHTFPAVLQSSGLYSLSSVVTVPSSSLGTQTYICNVNHKPSNTKVDKKVEPKSCDKTHTCPPCPAPELLGGPSVFLFPPKPKDTLMISRTPEVTCVVVDVSHEDPEVKFNWYVDGVEVHNAKTKPREEQYNSTYRVVSVLTVLHQDWLNGKEYKCKVSNKALPAPIEKTISKAKGQPREPQVYTLPPSRDELTKNQVSLTCLVKGFYPSDIAVEWESNGQPENNYKTTPPVLDSDGSFFLYSKLTVDKSRWQQGNVFSCSVMHEALHNHYTQKSLSLSPGK

SEQ ID NO: 835 - protein, 456 aa, synthetic construct
QVQLVESGGGVVQPGRSLRLSCAASGFPFSNYVMYWVRQAPGKGLEWVALIFFDGKKNYHADSVKGRFTITRDNSKNMLYLQMNSLRPEDAAVYYCAKIHCPNGVCYKGYYGMDVWGQGTTVTVSSASTKGPSVFPLAPSSKSTSGGTAALGCLVKDYFPEPVTVSWNSGALTSGVHTFPAVLQSSGLYSLSSVVTVPSSSLGTQTYICNVNHKPSNTKVDKKVEPKSCDKTHTCPPCPAPELLGGPSVFLFPPKPKDTLMISRTPEVTCVVVDVSHEDPEVKFNWYVDGVEVHNAKTKPREEQYNSTYRVVSVLTVLHQDWLNGKEYKCKVSNKALPAPIEKTISKAKGQPREPQVYTLPPSRDELTKNQVSLTCLVKGFYPSDIAVEWESNGQPENNYKTTPPVLDSDGSFFLYSKLTVDKSRWQQGNVFSCSVMHEALHNHYTQKSLSLSPGK

SEQ ID NO: 836 - protein, 455 aa, synthetic construct
EVQLVESGGGLVQPGGSLRLSCAASGFTFSNYWMNWVRQAPGKGLEWVANIKEDGGKKLYVDSVKGRFTISRDNAKNSLFLQMNSLRAEDTAVYYCAREDTTLVVDYYYYGMDVWGQGTTVTVSSASTKGPSVFPLAPSSKSTSGGTAALGCLVKDYFPEPVTVSWNSGALTSGVHTFPAVLQSSGLYSLSSVVTVPSSSLGTQTYICNVNHKPSNTKVDKKVEPKSCDKTHTCPPCPAPELLGGPSVFLFPPKPKDTLMISRTPEVTCVVVDVSHEDPEVKFNWYVDGVEVHNAKTKPREEQYNSTYRVVSVLTVLHQDWLNGKEYKCKVSNKALPAPIEKTISKAKGQPREPQVYTLPPSRDELTKNQVSLTCLVKGFYPSDIAVEWESNGQPENNYKTTPPVLDSDGSFFLYSKLTVDKSRWQQGNVFSCSVMHEALHNHYTQKSLSLSPGK

SEQ ID NO: 837 - protein, 452 aa, synthetic construct
QVQLVQSGAEVKKPGSSVKVSCKASGGTFNTYAITWVRQAPGQGLEWMGGIIPISGIAEYAQKFQGRVTITTDDSSTTAYMELNSLRSEDTAVYYCASWNYALYYFYGMDVWGRGTTVTVSSASTKGPSVFPLAPSSKSTSGGTAALGCLVKDYFPEPVTVSWNSGALTSGVHTFPAVLQSSGLYSLSSVVTVPSSSLGTQTYICNVNHKPSNTKVDKKVEPKSCDKTHTCPPCPAPELLGGPSVFLFPPKPKDTLMISRTPEVTCVVVDVSHEDPEVKFNWYVDGVEVHNAKTKPREEQYNSTYRVVSVLTVLHQDWLNGKEYKCKVSNKALPAPIEKTISKAKGQPREPQVYTLPPSRDELTKNQVSLTCLVKGFYPSDIAVEWESNGQPENNYKTTPPVLDSDGSFFLYSKLTVDKSRWQQGNVFSCSVMHEALHNHYTQKSLSLSPGK

SEQ ID NO: 838 - protein, 453 aa, synthetic construct
QVQLVESGGGLVKPGGSLRLSCAASGFTFSVYYMNWIRQAPGKGLEWVSYISSSGSTIYYADSVKGRFTISRDNAKNSLYLQMNSLRAEDTAVYYCGREGYSGTYSYYGMDVWGQGTTVTVSSASTKGPSVFPLAPSSKSTSGGTAALGCLVKDYFPEPVTVSWNSGALTSGVHTFPAVLQSSGLYSLSSVVTVPSSSLGTQTYICNVNHKPSNTKVDKKVEPKSCDKTHTCPPCPAPELLGGPSVFLFPPKPKDTLMISRTPEVTCVVVDVSHEDPEVKFNWYVDGVEVHNAKTKPREEQYNSTYRVVSVLTVLHQDWLNGKEYKCKVSNKALPAPIEKTISKAKGQPREPQVYTLPPSRDELTKNQVSLTCLVKGFYPSDIAVEWESNGQPENNYKTTPPVLDSDGSFFLYSKLTVDKSRWQQGNVFSCSVMHEALHNHYTQKSLSLSPGK

SEQ ID NO: 839 - protein, 452 aa, synthetic construct
EVQLVESGGGLVQPGRSLRLSCAVSGFTFDDYAMHWVRQAPGKGLEWVSGISWNSGTRGYADSVKGRFTISRDNAKNSLYLQMNSLRGEDTALYYCVKDITISPNYYGMDVWGQGTTVTVSSASTKGPSVFPLAPSSKSTSGGTAALGCLVKDYFPEPVTVSWNSGALTSGVHTFPAVLQSSGLYSLSSVVTVPSSSLGTQTYICNVNHKPSNTKVDKKVEPKSCDKTHTCPPCPAPELLGGPSVFLFPPKPKDTLMISRTPEVTCVVVDVSHEDPEVKFNWYVDGVEVHNAKTKPREEQYNSTYRVVSVLTVLHQDWLNGKEYKCKVSNKALPAPIEKTISKAKGQPREPQVYTLPPSRDELTKNQVSLTCLVKGFYPSDIAVEWESNGQPENNYKTTPPVLDSDGSFFLYSKLTVDKSRWQQGNVFSCSVMHEALHNHYTQKSLSLSPGK

SEQ ID NO: 840 - protein, 330 aa, synthetic construct [sequence omitted]

SEQ ID NO: 841 - DNA, 138 bp, synthetic construct
  source 1..138: mol_type = other DNA
gctgaggccgcggccaaggaagcggctgcaaaggaggctgctgcaaaagaggccgctgctaaagccctggaggcagaagcagcagccaaggaggcggcagctaaggaagccgcagccaaagaagctgccgccaaggcc

SEQ ID NO: 842 - protein, 46 aa, synthetic construct
AEAAAKEAAAKEAAAKEAAAKALEAEAAAKEAAAKEAAAKEAAAKA
